(19) United States
(12) Patent Application Publication
(10) Pub. No.: US 2025/0376680 A1
(43) Pub. Date: Dec. 11, 2025

(54) NUCLEIC ACID COMPOUNDS

(71) Applicant: E-Therapeutics PLC, London (GB)

(72) Inventors: Amy MCCARTHY, London (GB); Graham CRAGGS, London (GB); James LONGDEN, London (GB); Ines DE SANTIAGO, London (GB); Duncan BROWN, London (GB); Ahmad Ali MORTAZAVI, London (GB); Viviana MANNELLA, London (GB); Muthusamy JAYARAMAN, London (GB); Damian ELLE, London (GB); Alison GALLAFENT, London (GB); Laura ROCA-ALONSO, London (GB)

(21) Appl. No.: 18/876,959

(22) PCT Filed: Jul. 27, 2023
(86) PCT No.: PCT/EP2023/070919

§ 371 Date: Dec. 19, 2024

Related U.S. Application Data
(60) Provisional application No. 63/369,629, filed on Jul. 27, 2022.
(60) Provisional application No. 63/370,462, filed on Aug. 4, 2022.

(30) Foreign Application Priority Data
Feb. 6, 2023 (EP) 23155089.8

(51) Int. Cl. C12N 15/113; A61P 7/04

(52) U.S. Cl. CPC C12N 15/113; A61P 7/04; C12N 2310/14; C12N 2310/315; C12N 2310/322; C12N 2310/351

(57) ABSTRACT

The present invention provides novel nucleic acid compounds suitable for therapeutic use. Additionally, the present invention provides methods of making these compounds, as well as methods of using such compounds for the treatment of various diseases and conditions.

### FIELD

[0001] The present invention provides novel nucleic acid compounds, suitable for therapeutic use. Additionally, the present invention provides methods of making these compounds, as well as methods of using such compounds for the treatment of various diseases and conditions.

### BACKGROUND OF THE INVENTION

[0002] Nucleic acid compounds have important therapeutic applications in medicine. Nucleic acids can be used to silence genes that are responsible for a particular disease. Gene-silencing prevents formation of a protein by inhibiting translation. Importantly, gene-silencing agents are a promising alternative to traditional small, organic compounds that inhibit the function of the protein linked to the disease. siRNA, antisense RNA, and micro-RNA are oligonucleotides/oligonucleosides that prevent the formation of proteins by gene-silencing.

[0003] A number of modified siRNA compounds in particular have been developed in the last two decades for diagnostic and therapeutic purposes, including siRNA/RNAi therapeutic agents for the treatment of various diseases including central-nervous-system diseases, inflammatory diseases, metabolic disorders, oncology, infectious diseases, and ocular diseases.

[0004] The present invention relates to nucleic acid compounds, for use in the treatment and/or prevention of disease.

### STATEMENTS OF INVENTION

[0005] A nucleic acid for inhibiting expression of a target gene, comprising a duplex region that comprises: a first strand that is at least partially complementary to a portion of RNA transcribed from the target gene, and a second strand that is at least partially complementary to the first strand, wherein nucleosides of said second strand comprise a 2′ sugar modification pattern as follows (5′-3′):

Me-Me-Me-Me-Me-Me-F-F-F-F-F-Me-Me-Me-Me-Me-Me-
Me-F-Me-Me,
or
Me-Me-Me-Me-Me-F-F-Me-F-F-F-F-Me-Me-Me-Me-Me-Me-
Me-Me-Me,
or
Me-Me-Me-Me-Me-Me-F-Me-F-F-F-F-Me-Me-Me-Me-Me-
Me-Me-Me-Me.

[0006] A nucleic acid for inhibiting expression of a target gene, comprising a duplex region that comprises: a first strand that is at least partially complementary to a portion of RNA transcribed from the target gene, and a second strand that is at least partially complementary to the first strand, wherein nucleosides of said second strand comprise a 2′ sugar and bond modification pattern as follows (5′-3′):

Me(s)Me(s)Me-Me-Me-Me-F-F-F-F-F-Me-Me-Me-Me-Me-
Me-Me-F-Me-Me,
or
Me(s)Me(s)Me-Me-Me-F-F-Me-F-F-F-F-Me-Me-Me-Me-
Me-Me-Me-Me-Me,
or
Me(s)Me(s)Me-Me-Me-Me-F-Me-F-F-F-F-Me-Me-Me-Me-
Me-Me-Me-Me-Me,
or
Me(s)Me(s)Me-Me-Me-Me-Me-Me-F-F-F-Me-Me-Me-Me-
Me-Me-Me-Me-Me-Me,
or
Me-Me-Me-Me-Me-Me-F-F-F-F-F-Me-Me-Me-Me-Me-Me-
Me-F(s)Me(s)Me,
or
Me-Me-Me-Me-Me-F-F-Me-F-F-F-F-Me-Me-Me-Me-Me-Me-
Me(s)Me(s)Me,
or
Me-Me-Me-Me-Me-Me-F-Me-F-F-F-F-Me-Me-Me-Me-Me-
Me-Me(s)Me(s)Me,
or
Me-Me-Me-Me-Me-Me-Me-Me-F-F-F-Me-Me-Me-Me-Me-Me-
Me-Me(s)Me(s)Me

wherein (s) is a phosphorothioate internucleoside linkage.

[0007] A nucleic acid for inhibiting expression of a target gene, comprising a duplex region that comprises: a first strand that is at least partially complementary to a portion of RNA transcribed from the target gene, and a second strand that is at least partially complementary to the first strand, wherein nucleosides of said second strand comprise a 2′ sugar and abasic modification pattern as follows (5′-3′):

ia-ia-Me-Me-Me-Me-Me-Me-F-F-F-F-F-Me-Me-Me-Me-
Me-Me-Me-F-Me-Me,
or
ia-ia-Me-Me-Me-Me-Me-F-F-Me-F-F-F-F-Me-Me-Me-
Me-Me-Me-Me-Me-Me,
or
ia-ia-Me-Me-Me-Me-Me-Me-F-Me-F-F-F-F-Me-Me-Me-
Me-Me-Me-Me-Me-Me,
or
ia-ia-Me-Me-Me-Me-Me-Me-Me-Me-F-F-F-Me-Me-Me-Me-
Me-Me-Me-Me-Me-Me,
or
Me-Me-Me-Me-Me-Me-F-F-F-F-F-Me-Me-Me-Me-Me-Me-
Me-F-Me-Me-ia-ia,
or
Me-Me-Me-Me-Me-F-F-Me-F-F-F-F-Me-Me-Me-Me-Me-Me-
Me-Me-Me-ia-ia,
or
Me-Me-Me-Me-Me-Me-F-Me-F-F-F-F-Me-Me-Me-Me-Me-
Me-Me-Me-Me-ia-ia,
or
Me-Me-Me-Me-Me-Me-Me-Me-F-F-F-Me-Me-Me-Me-Me-
Me-Me-Me-Me-Me-ia-ia,

wherein ia represents an inverted abasic nucleoside, and when the inverted abasic nucleosides as represented by ia-ia are present at the 3′ terminus of the second strand, said inverted abasic nucleosides are typically present in a 2 nucleoside overhang.

[0008] A nucleic acid for inhibiting expression of a target gene, comprising a duplex region that comprises: a first strand that is at least partially complementary to a portion of RNA transcribed from the target gene, and a second strand that is at least partially complementary to the first strand, wherein nucleosides of said second strand comprise a 2′ sugar, abasic and bond modification pattern as follows (5′-3′):

ia-ia-Me(s)Me(s)Me-Me-Me-Me-F-F-F-F-F-Me-Me-Me-
Me-Me-Me-Me-F-Me-Me,
or
ia-ia-Me(s)Me(s)Me-Me-Me-F-F-Me-F-F-F-F-Me-Me-
Me-Me-Me-Me-Me-Me-Me,
or
ia-ia-Me(s)Me(s)Me-Me-Me-Me-F-Me-F-F-F-F-Me-Me-
Me-Me-Me-Me-Me-Me-Me,
or
ia-ia-Me(s)Me(s)Me-Me-Me-Me-Me-Me-F-F-F-Me-Me-
Me-Me-Me-Me-Me-Me-Me-Me,
Me-Me-Me-Me-Me-Me-F-F-F-F-F-Me-Me-Me-Me-Me-Me-
Me-F(s)Me(s)Me-ia-ia,
or
Me-Me-Me-Me-Me-F-F-Me-F-F-F-F-Me-Me-Me-Me-Me-Me-
Me(s)Me(s)Me-ia-ia,
or
Me-Me-Me-Me-Me-Me-F-Me-F-F-F-F-Me-Me-Me-Me-Me-
Me-Me(s)Me(s)Me-ia-ia,
or
Me-Me-Me-Me-Me-Me-Me-Me-F-F-F-Me-Me-Me-Me-Me-Me-
Me-Me(s)Me(s)Me-ia-ia,

wherein: (s) is a phosphorothioate internucleoside linkage, ia represents an inverted abasic nucleoside, and when the inverted abasic nucleosides as represented by ia-ia are present at the 3′ terminus of the second strand, said inverted abasic nucleosides are typically present in a 2 nucleoside overhang.

[0009] A nucleic acid as described herein typically includes a first strand that comprises a modification pattern selected from the following, or any combination thereof, wherein position 1 is the 5′ terminal nucleoside of the first strand and the direction of counting is 5′-3′:
[0010] 2′-F sugar modifications at least at positions 2, 14 and 16, and/or 2′-Me sugar modifications at positions 17 to 23, or said first strand comprises at least eight 2′
[0011] F sugar modifications, such as 2′-F sugar modifications at least at positions 2, 4, 6, 12, 14, 16, 18 and 20, and/or
[0012] 2′-Me sugar modifications at positions 1, 3 to 5, 10 to 13, or said first strand comprises at least eight 2′-F sugar modifications, such as 2′-F sugar modifications at least at positions 2, 4, 6, 12, 14, 16, 18 and 20, and/or
[0013] a 2′-Me sugar modification at position 7 or a thermally destabilising modification, such as typically a modified unlocked nucleic acid or a glycol nucleic acid, at position 7, and/or
[0014] a 2′-F sugar modification or a thermally destabilising modification, such as typically a modified unlocked nucleic acid or a glycol nucleic acid, at position 6, and/or
[0015] positions 8 and 9 can be a modification selected from a 2′-Me sugar modification and a 2′-F sugar modification, and typically can be the same 2′ sugar modification,
[0016] whereby typically the first strand can comprise the following modification pattern (5′-3′):

Me-F-Me-Me-Me-(M)₄-Me-Me-Me-Me-F-Me-F-Me-Me-Me-
Me-Me-Me-Me

[0017] where M represents a modification selected from a 2′-Me sugar modification, a 2′-F sugar modification and a thermally destabilising modification, such as typically a modified unlocked nucleic acid or a glycol nucleic acid, that may typically be present at position 6, and it may typically be that a 2′-Me sugar modification is present at position 7,
[0018] or whereby typically the first strand comprises the following modification pattern (5′-3′):

Me-F-Me-Me-Me-(M1)-(M2)₃-Me-Me-Me-Me-F-Me-F-Me-
Me-Me-Me-Me-Me-Me

[0019] where M1 represents a thermally destabilising modification, such as typically a modified unlocked nucleic acid or a glycol nucleic acid, M2 represents a modification selected from a 2′-Me sugar modification and a 2′-F sugar modification,
[0020] or whereby typically the first strand comprises the following modification pattern (5′-3′):

Me-F-Me-Me-Me-(M1)-Me-(M2)₂-Me-Me-Me-Me-F-Me-F-
Me-Me-Me-Me-Me-Me-Me

[0021] where M1 represents a modification selected from a 2′-Me sugar modification, a 2′-F sugar modification and a thermally destabilising modification, such as typically a modified unlocked nucleic acid or a glycol nucleic acid, and M2 represents a modification selected from a 2′-Me sugar modification and a 2′-F sugar modification,
[0022] or whereby typically the first strand comprises the following modification pattern (5′-3′):

Me-F-Me-Me-Me-(M1)-Me-(M2)₂-Me-Me-Me-Me-F-Me-F-
Me-Me-Me-Me-Me-Me-Me

[0023] where M1 represents a thermally destabilising modification, such as typically a modified unlocked nucleic acid or a glycol nucleic acid, and M2 represents a modification selected from a 2′-Me sugar modification and a 2′-F sugar modification, and typically M2 can be the same 2′ sugar modification.

[0024] Typically (M)₄ as set out above represents any one of the following 2′ sugar modification patterns (5′-3′):

F-Me-Me-F
Me-F-Me-F
F-Me-F-Me
F-F-F-F
Me-F-F-Me
Me-Me-F-F
F-F-Me-Me
Me-Me-Me-Me

[0025] Typically, two phosphorothioate internucleoside linkages are respectively present between three consecutive positions in both 5′ and 3′ terminal regions of the first strand s as described herein, whereby a terminal nucleoside respectively at each of the 5′ and 3′ terminal regions of said first strand is each attached to a respective 5′ and 3′ adjacent penultimate nucleoside by a phosphorothioate internucleoside linkage, and each 5′ and 3′ penultimate nucleoside is attached to a respective 5′ and 3′ adjacent antepenultimate nucleoside by a phosphorothioate internucleoside linkage, and where appropriate there may further be present two phosphorothioate internucleoside linkages between three consecutive positions in the 3′ terminal region of the second strand, whereby the 3′ terminal nucleoside is attached to an adjacent penultimate nucleoside by a phosphorothioate internucleoside linkage, and said penultimate nucleoside is attached to an adjacent antepenultimate nucleoside by a phosphorothioate internucleoside linkage, and/or where appropriate there may further be present two phosphorothioate internucleoside linkages between three consecutive positions in the 5′ terminal region of the second strand, whereby the 5′ terminal nucleoside is attached to an adjacent penultimate nucleoside by a phosphorothioate internucleoside linkage, and said penultimate nucleoside is attached to an adjacent antepenultimate nucleoside by a phosphorothioate internucleoside linkage.

[0026] A nucleic acid for inhibiting expression of a target gene, comprising a duplex region that comprises: a first strand that is at least partially complementary to a portion of RNA transcribed from the target gene, and a second strand that is at least partially complementary to the first strand, wherein nucleosides of said second strand comprise a 2′ sugar and abasic modification pattern as follows:
[0027] Second strand (5′-3′): ia-ia-Me-Me-Me-Me-Me-Me-Me-Me-F-F-F-Me-Me-Me-Me-Me-Me-Me-Me-Me-Me
[0028] or position 7 on the second strand includes a sugar modification that is a 2′-Me modification, wherein position 1 is the 5′ terminal nucleoside of the second strand and the direction of counting is 5′-3′, and there are typically present two inverted abasic nucleosides at 5′ terminal region of the second strand,
[0029] where such second strands are typically used together with a first strand as defined herein.

[0030] A nucleic acid for inhibiting expression of a target gene, comprising a duplex region that comprises: a first strand that is at least partially complementary to a portion of RNA transcribed from the target gene, and a second strand that is at least partially complementary to the first strand, wherein nucleosides of said second and first strands comprise a 2′ sugar modification pattern as follows (5′-3′):
[0031] Modification pattern 1:
[0032] Second strand (5′-3′): Me-Me-Me-Me-Me-Me-F-F-F-F-F-Me-Me-Me-Me Me-Me-Me-F-Me-Me,
[0033] First strand (5′-3′): Me-F-Me-F-Me-F-Me-F-F-Me-Me-Me-Me-F-Me-F-Me-Me-Me-Me-Me-Me-Me
[0034] Or Modification pattern 2:
[0035] Second strand (5′-3′): Me-Me-Me-Me-Me-F-F-Me-F-F-F-F-Me-Me-Me-Me-Me-Me-Me-Me-Me,
[0036] First strand (5′-3′): Me-F-Me-F-Me-F-Me-F-F-Me-Me-Me-Me-F-Me-F-Me-Me-Me-Me-Me-Me-Me
[0037] Or Modification pattern 3:
[0038] Second strand (5′-3′): Me-Me-Me-Me-Me-Me-F-Me-F-F-F-F-Me-Me-Me-Me-Me-Me-Me-Me-Me,
[0039] First strand (5′-3′): Me-F-Me-F-Me-F-Me-F-F-Me-Me-Me-Me-F-Me-F-Me-Me-Me-Me-Me-Me-Me
[0040] Or Modification pattern 4:
[0041] Second strand (5′-3′): Me-Me-Me-Me-Me-Me-F-Me-F-F-F-F-Me-Me-Me Me-Me-Me-Me-Me-Me,
[0042] First strand (5′-3′): Me-F-Me-F-Me-F-Me-Me-Me-Me-Me-Me-Me-F-Me-F-Me-Me-Me-Me-Me-Me-Me
[0043] Or Modification pattern 5:
[0044] Second strand (5′-3′): Me-Me-Me-Me-Me-Me-Me-Me-F-F-F-Me-Me-Me-Me-Me-Me-Me-Me-Me-Me,
[0045] First strand (5′-3′): Me-F-Me-Me-Me-F-Me-Me-F-Me-Me-Me-Me-F-Me-F-Me-Me-Me-Me-Me-Me-Me

[0046] A nucleic acid for inhibiting expression of a target gene, comprising a duplex region that comprises: a first strand that is at least partially complementary to a portion of RNA transcribed from the target gene, and a second strand that is at least partially complementary to the first strand, wherein nucleosides of said second and first strands comprise a 2′ sugar modification pattern as follows (5′-3′):
[0047] Second strand (5′-3′): Me-Me-Me-Me-Me-Me-F-Me-F-F-F-F-Me-Me-Me Me-Me-Me-Me-Me-Me,
[0048] First strand (5′-3′): Me-F-Me-F-Me-F-Me-Me-Me-Me-Me-Me-Me-F-Me-F-Me-Me-Me-Me-Me-Me-Me
[0049] or
[0050] Second strand (5′-3′): Me-Me-Me-Me-Me-Me-Me-Me-F-F-F-Me-Me-Me-Me-Me-Me-Me-Me-Me-Me,
[0051] First strand (5′-3′): Me-F-Me-Me-Me-F-Me-Me-F-Me-Me-Me-Me-F-Me-F-Me-Me-Me-Me-Me-Me-Me

[0052] A nucleic acid for inhibiting expression of a target gene, comprising a duplex region that comprises: a first strand that is at least partially complementary to a portion of RNA transcribed from the target gene, and a second strand that is at least partially complementary to the first strand, wherein nucleosides of said second and first strands comprise a 2′ sugar and bond modification pattern as follows:
[0053] (5′-3′): Modification pattern 1:
[0054] Second strand (5′-3′): Me(s)Me(s)Me-Me-Me-Me-F-F-F-F-F-Me-Me-Me-Me-Me-Me-Me-F-Me-Me,
[0055] First strand (5′-3′): Me(s)F(s)Me-F-Me-F-Me-F-F-Me-Me-Me-Me-F-Me-F Me-Me-Me-Me-Me(s)Me(s)Me
[0056] Or Modification pattern 2:
[0057] Second strand (5′-3′): Me(s)Me(s)Me-Me-Me-F-F-Me-F-F-F-F-Me-Me-Me-Me-Me-Me-Me-Me-Me,
[0058] First strand (5′-3′): Me(s)F(s)Me-F-Me-F-Me-F-F-Me-Me-Me-Me-F-Me-F Me-Me-Me-Me-Me(s)Me(s)Me
[0059] Or Modification pattern 3:
[0060] Second strand (5′-3′): Me(s)Me(s)Me-Me-Me-Me-F-Me-F-F-F-F-Me-Me-Me Me-Me-Me-Me-Me-Me,
[0061] First strand (5′-3′): Me(s)F(s)Me-F-Me-F-Me-F-F-Me-Me-Me-Me-F-Me-F Me-Me-Me-Me-Me(s)Me(s)Me
[0062] Or Modification pattern 4:
[0063] Second strand (5′-3′): Me(s)Me(s)Me-Me-Me-Me-F-Me-F-F-F-F-Me-Me-Me-Me-Me-Me-Me-Me-Me,
[0064] First strand (5′-3′): Me(s)F(s)Me-F-Me-F-Me-Me-Me-Me-Me-Me-Me-F-Me F-Me-Me-Me-Me-Me(s)Me(s)Me
[0065] Or Modification pattern 5:
[0066] Second strand (5′-3′): Me(s)Me(s)Me-Me-Me-Me-Me-Me-F-F-F-Me-Me-Me Me-Me-Me-Me-Me-Me-Me,
[0067] First strand (5′-3′): Me(s)F(s)Me-Me-Me-F-Me-Me-F-Me-Me-Me-Me-F-Me F-Me-Me-Me-Me-Me(s)Me(s)Me
[0068] Or Modification pattern 6:
[0069] Second strand (5′-3′): Me(s)Me(s)Me-Me-Me-Me-F-Me-F-F-F-Me-Me-Me-Me-Me-Me-Me-Me-Me-Me,
[0070] First strand (5′-3′): Me(s)F(s)Me-Me-Me-F-Me-Me-F-Me-Me-Me-Me-F-Me F-Me-Me-Me-Me-Me(s)Me(s)Me
[0071] wherein (s) is a phosphorothioate internucleoside linkage.

[0072] A nucleic acid for inhibiting expression of a target gene, comprising a duplex region that comprises: a first strand that is at least partially complementary to a portion of RNA transcribed from the target gene, and a second strand that is at least partially complementary to the first strand, wherein nucleosides of said second and first strands comprise a 2′ sugar and bond modification pattern as follows (5′-3′):
[0073] Second strand (5′-3′): Me(s)Me(s)Me-Me-Me-Me-F-Me-F-F-F-F-Me-Me-Me-Me-Me-Me-Me-Me-Me,
[0074] First strand (5′-3′): Me(s)F(s)Me-F-Me-F-Me-Me-Me-Me-Me-Me-Me-F-Me F-Me-Me-Me-Me-Me(s)Me(s)Me
[0075] or
[0076] Second strand (5′-3′): Me(s)Me(s)Me-Me-Me-Me-Me-Me-F-F-F-Me-Me-Me Me-Me-Me-Me-Me-Me-Me,
[0077] First strand (5′-3′): Me(s)F(s)Me-Me-Me-F-Me-Me-F-Me-Me-Me-Me-F-Me F-Me-Me-Me-Me-Me(s)Me(s)Me
[0078] wherein (s) is a phosphorothioate internucleoside linkage.

[0079] A nucleic acid for inhibiting expression of a target gene, comprising a duplex region that comprises a first strand that is at least partially complementary to a portion of RNA transcribed from the target gene, and a second strand that is at least partially complementary to the first strand, wherein nucleosides of said second and first strands comprise a 2′ sugar and bond modification pattern as follows:
[0080] (5′-3′): Modification pattern 1:
[0081] Second strand (5′-3′): Me-Me-Me-Me-Me-Me-F-F-F-F-F-Me-Me-Me-Me-Me-Me-Me-F(s)Me(s)Me,
[0082] First strand (5′-3′): Me(s)F(s)Me-F-Me-F-Me-F-F-Me-Me-Me-Me-F-Me-F-Me-Me-Me-Me-Me(s)Me(s)Me
[0083] Or Modification pattern 2:
[0084] Second strand (5′-3′): Me-Me-Me-Me-Me-F-F-Me-F-F-F-F-Me-Me-Me-Me-Me-Me-Me(s)Me(s)Me,
[0085] First strand (5′-3′): Me(s)F(s)Me-F-Me-F-Me-F-F-Me-Me-Me-Me-F-Me-F-Me-Me-Me-Me-Me(s)Me(s)Me
[0086] Or Modification pattern 3:
[0087] Second strand (5′-3′): Me-Me-Me-Me-Me-Me-F-Me-F-F-F-F-Me-Me-Me-Me-Me-Me-Me(s)Me(s)Me,
[0088] First strand (5′-3′): Me(s)F(s)Me-F-Me-F-Me-F-F-Me-Me-Me-Me-F-Me-F-Me-Me-Me-Me-Me(s)Me(s)Me
[0089] Or Modification pattern 4:
[0090] Second strand (5′-3′): Me-Me-Me-Me-Me-Me-F-Me-F-F-F-F-Me-Me-Me-Me-Me-Me-Me(s)Me(s)Me,
[0091] First strand (5′-3′): Me(s)F(s)Me-F-Me-F-Me-Me-Me-Me-Me-Me-Me-F-Me-F-Me-Me-Me-Me-Me(s)Me(s)Me
[0092] Or Modification pattern 5:
[0093] Second strand (5′-3′): Me-Me-Me-Me-Me-Me-Me-Me-F-F-F-Me-Me-Me-Me-Me-Me-Me-Me(s)Me(s)Me,
[0094] First strand (5′-3′): Me(s)F(s)Me-Me-Me-F-Me-Me-F-Me-Me-Me-Me-F-Me-F-Me-Me-Me-Me-Me(s)Me(s)Me
[0095] Or Modification pattern 6:
[0096] Second strand (5′-3′): Me-Me-Me-Me-Me-Me-F-Me-F-F-F-Me-Me-Me-Me-Me-Me-Me-Me(s)Me(s)Me,
[0097] First strand (5′-3′): Me(s)F(s)Me-Me-Me-F-Me-Me-F-Me-Me-Me-Me-F-Me-F-Me-Me-Me-Me-Me(s)Me(s)Me
[0098] wherein (s) is a phosphorothioate internucleoside linkage.

[0099] A nucleic acid for inhibiting expression of a target gene, comprising a duplex region that comprises: a first strand that is at least partially complementary to a portion of RNA transcribed from the target gene, and a second strand that is at least partially complementary to the first strand, wherein nucleosides of said second and first strands comprise a 2′ sugar and abasic modification pattern as follows (5′-3′):
[0100] Modification pattern 1:
[0101] Second strand (5′-3′): ia-ia-Me-Me-Me-Me-Me-Me-F-F-F-F-F-Me-Me-Me-Me-Me-Me-Me-F-Me-Me,
[0102] First strand (5′-3′): Me-F-Me-F-Me-F-Me-F-F-Me-Me-Me-Me-F-Me-F-Me-Me-Me-Me-Me-Me-Me
[0103] Or Modification pattern 2:
[0104] Second strand (5′-3′): ia-ia-Me-Me-Me-Me-Me-F-F-Me-F-F-F-F-Me-Me-Me-Me-Me-Me-Me-Me-Me,
[0105] First strand (5′-3′): Me-F-Me-F-Me-F-Me-F-F-Me-Me-Me-Me-F-Me-F-Me-Me-Me-Me-Me-Me-Me
[0106] Or Modification pattern 3:
[0107] Second strand (5′-3′): ia-ia-Me-Me-Me-Me-Me-Me-F-Me-F-F-F-F-Me-Me-Me-Me-Me-Me-Me-Me-Me,
[0108] First strand (5′-3′): Me-F-Me-F-Me-F-Me-F-F-Me-Me-Me-Me-F-Me-F-Me-Me-Me-Me-Me-Me-Me
[0109] Or Modification pattern 4:
[0110] Second strand (5′-3′): ia-ia-Me-Me-Me-Me-Me-Me-F-Me-F-F-F-F-Me-Me-Me-Me-Me-Me-Me-Me-Me,
[0111] First strand (5′-3′): Me-F-Me-F-Me-F-Me-Me-Me-Me-Me-Me-Me-F-Me-F-Me-Me-Me-Me-Me-Me-Me
[0112] Or Modification pattern 5:
[0113] Second strand (5′-3′): ia-ia-Me-Me-Me-Me-Me-Me-Me-Me-F-F-F-Me-Me-Me-Me-Me-Me-Me-Me-Me-Me,
[0114] First strand (5′-3′): Me-F-Me-Me-Me-F-Me-Me-F-Me-Me-Me-Me-F-Me-F-Me-Me-Me-Me-Me-Me-Me
[0115] Or Modification pattern 6:
[0116] Second strand (5′-3′): ia-ia-Me-Me-Me-Me-Me-Me-F-Me-F-F-F-Me-Me-Me-Me-Me-Me-Me-Me-Me-Me
[0117] First strand (5′-3′): Me-F-Me-Me-Me-F-Me-Me-F-Me-Me-Me-Me-F-Me-F-Me-Me-Me-Me-Me-Me-Me
[0118] wherein ia represents an inverted abasic nucleoside.

[0119] A nucleic acid for inhibiting expression of a target gene, comprising a duplex region that comprises: a first strand that is at least partially complementary to a portion of RNA transcribed from the target gene, and a second strand that is at least partially complementary to the first strand, wherein nucleosides of said second and first strands comprise a 2′ sugar and abasic modification pattern as follows (5′-3′):
[0120] Second strand (5′-3′): ia-ia-Me-Me-Me-Me-Me-Me-F-Me-F-F-F-F-Me-Me-Me-Me-Me-Me-Me-Me-Me,
[0121] First strand (5′-3′): Me-F-Me-F-Me-F-Me-Me-Me-Me-Me-Me-Me-F-Me-F-Me-Me-Me-Me-Me-Me-Me
[0122] or
[0123] Second strand (5′-3′): ia-ia-Me-Me-Me-Me-Me-Me-Me-Me-F-F-F-Me-Me-Me-Me-Me-Me-Me-Me-Me-Me,
[0124] First strand (5′-3′): Me-F-Me-Me-Me-F-Me-Me-F-Me-Me-Me-Me-F-Me-F-Me-Me-Me-Me-Me-Me-Me
[0125] wherein ia represents an inverted abasic nucleoside.

[0126] A nucleic acid for inhibiting expression of a target gene, comprising a duplex region that comprises: a first strand that is at least partially complementary to a portion of RNA transcribed from the target gene, and a second strand that is at least partially complementary to the first strand, wherein nucleosides of said second and first strands comprise a 2′ sugar and abasic modification pattern as follows (5′-3′):
[0127] Modification pattern 1:
[0128] Second strand (5′-3′): Me-Me-Me-Me-Me-Me-F-F-F-F-F-Me-Me-Me-Me-Me-Me-Me-F-Me-Me-ia-ia,
[0129] First strand (5′-3′): Me-F-Me-F-Me-F-Me-F-F-Me-Me-Me-Me-F-Me-F-Me-Me-Me-Me-Me-Me-Me
[0130] Or Modification pattern 2:
[0131] Second strand (5′-3′): Me-Me-Me-Me-Me-F-F-Me-F-F-F-F-Me-Me-Me-Me-Me-Me-Me-Me-Me-ia-ia,
[0132] First strand (5′-3′): Me-F-Me-F-Me-F-Me-F-F-Me-Me-Me-Me-F-Me-F-Me-Me-Me-Me-Me-Me-Me
[0133] Or Modification pattern 3:
[0134] Second strand (5′-3′): Me-Me-Me-Me-Me-Me-F-Me-F-F-F-F-Me-Me-Me-Me-Me-Me-Me-Me-Me-ia-ia,
[0135] First strand (5′-3′): Me-F-Me-F-Me-F-Me-F-F-Me-Me-Me-Me-F-Me-F-Me-Me-Me-Me-Me-Me-Me
[0136] Or Modification pattern 4:
[0137] Second strand (5′-3′): Me-Me-Me-Me-Me-Me-F-Me-F-F-F-F-Me-Me-Me-Me-Me-Me-Me-Me-Me-ia-ia,
[0138] First strand (5′-3′): Me-F-Me-F-Me-F-Me-Me-Me-Me-Me-Me-Me-F-Me-F-Me-Me-Me-Me-Me-Me-Me
[0139] Or Modification pattern 5:
[0140] Second strand (5′-3′): Me-Me-Me-Me-Me-Me-Me-Me-F-F-F-Me-Me-Me-Me-Me-Me-Me-Me-Me-Me-ia-ia,
[0141] First strand (5′-3′): Me-F-Me-Me-Me-F-Me-Me-F-Me-Me-Me-Me-F-Me-F-Me-Me-Me-Me-Me-Me-Me
[0142] Or Modification pattern 6:
[0143] Second strand (5′-3′): Me-Me-Me-Me-Me-Me-F-Me-F-F-F-Me-Me-Me-Me-Me-Me-Me-Me-Me-Me-ia-ia
[0144] First strand (5′-3′): Me-F-Me-Me-Me-F-Me-Me-F-Me-Me-Me-Me-F-Me-F-Me-Me-Me-Me-Me-Me-Me,
[0145] wherein ia represents an inverted abasic nucleoside, and when the inverted abasic nucleosides as represented by ia-ia are present at the 3′ terminus of the second strand, said inverted abasic nucleosides are typically present in a 2 nucleoside overhang.

[0146] A nucleic acid for inhibiting expression of a target gene, comprising a duplex region that comprises: a first strand that is at least partially complementary to a portion of RNA transcribed from the target gene, and a second strand that is at least partially complementary to the first strand, wherein nucleosides of said second and first strands comprise a 2′ sugar, abasic and bond modification pattern as follows (5′-3′):
[0147] Modification pattern 1:
[0148] Second strand (5′-3′): ia-ia-Me(s)Me(s)Me-Me-Me-Me-F-F-F-F-F-Me-Me-Me-Me-Me-Me-Me-F-Me-Me,
[0149] First strand (5′-3′): Me(s)F(s)Me-F-Me-F-Me-F-F-Me-Me-Me-Me-F-Me-F-Me-Me-Me-Me-Me(s)Me(s)Me
[0150] Or Modification pattern 2:
[0151] Second strand (5′-3′): ia-ia-Me(s)Me(s)Me-Me-Me-F-F-Me-F-F-F-F-Me-Me-Me-Me-Me-Me-Me-Me-Me,
[0152] First strand (5′-3′): Me(s)F(s)Me-F-Me-F-Me-F-F-Me-Me-Me-Me-F-Me-F-Me-Me-Me-Me-Me(s)Me(s)Me
[0153] Or Modification pattern 3:
[0154] Second strand (5′-3′): ia-ia-Me(s)Me(s)Me-Me-Me-Me-F-Me-F-F-F-F-Me-Me-Me-Me-Me-Me-Me-Me-Me,
[0155] First strand (5′-3′): Me(s)F(s)Me-F-Me-F-Me-F-F-Me-Me-Me-Me-F-Me-F-Me-Me-Me-Me-Me(s)Me(s)Me
[0156] Or Modification pattern 4:
[0157] Second strand (5′-3′): ia-ia-Me(s)Me(s)Me-Me-Me-Me-F-Me-F-F-F-F-Me-Me-Me-Me-Me-Me-Me-Me-Me,
[0158] First strand (5′-3′): Me(s)F(s)Me-F-Me-F-Me-Me-Me-Me-Me-Me-Me-F-Me-F-Me-Me-Me-Me-Me(s)Me(s)Me
[0159] Or Modification pattern 5:
[0160] Second strand (5′-3′): ia-ia-Me(s)Me(s)Me-Me-Me-Me-Me-Me-F-F-F-Me-Me-Me-Me-Me-Me-Me-Me-Me-Me,
[0161] First strand (5′-3′): Me(s)F(s)Me-Me-Me-F-Me-Me-F-Me-Me-Me-Me-F-Me-F-Me-Me-Me-Me-Me(s)Me(s)Me
[0162] Or Modification pattern 6:
[0163] Second strand (5′-3′): ia-ia-Me(s)Me(s)Me-Me-Me-Me-F-Me-F-F-F-Me-Me-Me-Me-Me-Me-Me-Me-Me-Me,
[0164] First strand (5′-3′): Me(s)F(s)Me-Me-Me-F-Me-Me-F-Me-Me-Me-Me-F-Me-F-Me-Me-Me-Me-Me(s)Me(s)Me
[0165] wherein: (s) is a phosphorothioate internucleoside linkage, ia represents an inverted abasic nucleoside.

[0166] A nucleic acid for inhibiting expression of a target gene, comprising a duplex region that comprises: a first strand that is at least partially complementary to a portion of RNA transcribed from the target gene, and a second strand that is at least partially complementary to the first strand, wherein nucleosides of said second and first strands comprise a 2′ sugar, abasic and bond modification pattern as follows (5′-3′):
[0167] Second strand (5′-3′): ia-ia-Me(s)Me(s)Me-Me-Me-Me-F-Me-F-F-F-F-Me-Me-Me-Me-Me-Me-Me-Me-Me,
[0168] First strand (5′-3′): Me(s)F(s)Me-F-Me-F-Me-Me-Me-Me-Me-Me-Me-F-Me-F-Me-Me-Me-Me-Me(s)Me(s)Me
[0169] or
[0170] Second strand (5′-3′): ia-ia-Me(s)Me(s)Me-Me-Me-Me-Me-Me-F-F-F-Me-Me-Me-Me-Me-Me-Me-Me-Me-Me,
[0171] First strand (5′-3′): Me(s)F(s)Me-Me-Me-F-Me-Me-F-Me-Me-Me-Me-F-Me-F-Me-Me-Me-Me-Me(s)Me(s)Me
[0172] wherein: (s) is a phosphorothioate internucleoside linkage, ia represents an inverted abasic nucleoside.

[0173] A nucleic acid for inhibiting expression of ZPI or HCII, comprising a duplex region that comprises: a first strand that is at least partially complementary to a portion of RNA transcribed from ZPI or HCII, and a second strand that is at least partially complementary to the first strand, wherein nucleosides of said second and first strands comprise a 2′ sugar, abasic and bond modification pattern as follows (5′-3′):
[0174] Second strand (5′-3′): ia-ia-Me(s)Me(s)Me-Me-Me-Me-F-Me-F-F-F-F-Me-Me-Me-Me-Me-Me-Me-Me-Me,
[0175] First strand (5′-3′): Me(s)F(s)Me-F-Me-F-Me-Me-Me-Me-Me-Me-Me-F-Me-F-Me-Me-Me-Me-Me(s)Me(s)Me
[0176] wherein: (s) is a phosphorothioate internucleoside linkage, ia represents an inverted abasic nucleoside.

[0177] A nucleic acid for inhibiting expression of B4GALT1, comprising a duplex region that comprises: a first strand that is at least partially complementary to a portion of RNA transcribed from B4GALT1, and a second strand that is at least partially complementary to the first strand, wherein nucleosides of said second and first strands comprise a 2′ sugar, abasic and bond modification pattern as follows (5′-3′):
[0178] Second strand (5′-3′): ia-ia-Me(s)Me(s)Me-Me-Me-Me-Me-Me-F-F-F-Me-Me-Me-Me-Me-Me-Me-Me-Me-Me,
[0179] First strand (5′-3′): Me(s)F(s)Me-Me-Me-F-Me-Me-F-Me-Me-Me-Me-F-Me-F-Me-Me-Me-Me-Me(s)Me(s)Me
[0180] wherein: (s) is a phosphorothioate internucleoside linkage, ia represents an inverted abasic nucleoside.

[0181] A nucleic acid for inhibiting expression of a target gene, comprising a duplex region that comprises: a first strand that is at least partially complementary to a portion of RNA transcribed from the target gene, and a second strand that is at least partially complementary to the first strand, wherein nucleosides of said second and first strands comprise a 2′ sugar, abasic and bond modification pattern as follows (5′-3′):
[0182] Modification pattern 1:
[0183] Second strand (5′-3′): Me-Me-Me-Me-Me-Me-F-F-F-F-F-Me-Me-Me-Me Me-Me-Me-F(s)Me(s)Me-ia-ia,
[0184] First strand (5′-3′): Me(s)F(s)Me-F-Me-F-Me-F-F-Me-Me-Me-Me-F-Me-F Me-Me-Me-Me-Me(s)Me(s)Me
[0185] Or Modification pattern 2:
[0186] Second strand (5′-3′): Me-Me-Me-Me-Me-F-F-Me-F-F-F-F-Me-Me-Me-Me-Me-Me-Me(s)Me(s)Me-ia-ia,
[0187] First strand (5′-3′): Me(s)F(s)Me-F-Me-F-Me-F-F-Me-Me-Me-Me-F-Me-F Me-Me-Me-Me-Me(s)Me(s)Me
[0188] Or Modification pattern 3:
[0189] Second strand (5′-3′): Me-Me-Me-Me-Me-Me-F-Me-F-F-F-F-Me-Me-Me-Me-Me-Me-Me(s)Me(s)Me-ia-ia,
[0190] First strand (5′-3′): Me(s)F(s)Me-F-Me-F-Me-F-F-Me-Me-Me-Me-F-Me-F Me-Me-Me-Me-Me(s)Me(s)Me
[0191] Or Modification pattern 4:
[0192] Second strand (5′-3′): Me-Me-Me-Me-Me-Me-F-Me-F-F-F-F-Me-Me-Me Me-Me-Me-Me(s)Me(s)Me-ia-ia,
[0193] First strand (5′-3′): Me(s)F(s)Me-F-Me-F-Me-Me-Me-Me-Me-Me-Me-F-Me F-Me-Me-Me-Me-Me(s)Me(s)Me
[0194] Or Modification pattern 5:
[0195] Second strand (5′-3′): Me-Me-Me-Me-Me-Me-Me-Me-F-F-F-Me-Me-Me-Me-Me-Me-Me-Me(s)Me(s)Me-ia-ia,
[0196] First strand (5′-3′): Me(s)F(s)Me-Me-Me-F-Me-Me-F-Me-Me-Me-Me-F-Me F-Me-Me-Me-Me-Me(s)Me(s)Me
[0197] Or Modification pattern 6:
[0198] Second strand (5′-3′): Me-Me-Me-Me-Me-Me-F-Me-F-F-F-Me-Me-Me-Me-Me-Me-Me-Me(s)Me(s)Me-ia-ia,
[0199] First strand (5′-3′): Me(s)F(s)Me-Me-Me-F-Me-Me-F-Me-Me-Me-Me-F-Me F-Me-Me-Me-Me-Me(s)Me(s)Me
[0200] wherein: (s) is a phosphorothioate internucleoside linkage, ia represents an inverted abasic nucleoside, and when the inverted abasic nucleosides as represented by ia-ia are present at the 3′ terminus of the second strand, said inverted abasic nucleosides are typically present in a 2 nucleoside overhang.

[0201] A particularly suitable nucleic acid for inhibiting expression of a target gene according to the present invention, comprising a duplex region that comprises: a first strand that is at least partially complementary to a portion of RNA transcribed from the target gene, and a second strand that is at least partially complementary to the first strand, wherein
[0202] the second strand comprises, counting from the 5′ terminus position 1 of the second strand, which is the 5′ most nucleoside not including abasic nucleosides, position 7 on the second strand includes a sugar modification that is a 2′-Me modification, or
[0203] the second strand comprises the following modification pattern:
[0204] Second strand (5′-3′): Me-Me-Me-Me-Me-Me-Me-Me-F-F-F-Me-Me-Me-Me-Me-Me-Me-Me-Me-Me

[0205] Particularly suitable nucleic acids according to the present invention are as follows:
[0206] Second strand (5′-3′): ia-ia-Me-Me-Me-Me-Me-Me-Me-Me-F-F-F-Me Me-Me-Me-Me-Me-Me-Me-Me-Me
[0207] together with a first strand that comprises a modification pattern selected from the following (5′-3′), wherein position 1 is the 5′ terminal nucleoside of the first strand and the direction of counting is 5′-3′:

(5′-3′)Me-F-Me-Me-Me-(M)₄-Me-Me-Me-Me-F-Me-F-Me-
Me-Me-Me-Me-Me-Me

[0208] where M represents a modification selected from a 2′-Me sugar modification, a 2′-F sugar modification and a thermally destabilising modification, such as typically a modified unlocked nucleic acid or a glycol nucleic acid, that may typically be present at position 6, and it may typically be that a 2′-Me sugar modification is present at position 7,
[0209] or whereby typically the first strand comprises the following modification pattern (5′-3′):

(5′-3′)Me-F-Me-Me-Me-(M1)-(M2)₃-Me-Me-Me-Me-F-Me-
F-Me-Me-Me-Me-Me-Me-Me

[0210] where M1 represents a thermally destabilising modification, such as typically a modified unlocked nucleic acid or a glycol nucleic acid, M2 represents a modification selected from a 2′-Me sugar modification and a 2′-F sugar modification,
[0211] or whereby typically the first strand comprises the following modification pattern (5′-3′):

(5′-3′)Me-F-Me-Me-Me-(M1)-Me-(M2)₂-Me-Me-Me-Me-
F-Me-F-Me-Me-Me-Me-Me-Me-Me

[0212] where M1 represents a modification selected from a 2′-Me sugar modification, a 2′-F sugar modification and a thermally destabilising modification, such as typically a modified unlocked nucleic acid or a glycol nucleic acid, and M2 represents a modification selected from a 2′-Me sugar modification and a 2′-F sugar modification,
[0213] or whereby typically the first strand comprises the following modification pattern (5′-3′):

(5′-3′)Me-F-Me-Me-Me-(M1)-Me-(M2)₂-Me-Me-Me-Me-
F-Me-F-Me-Me-Me-Me-Me-Me-Me

[0214] where M1 represents a thermally destabilising modification, such as typically a modified unlocked nucleic acid or a glycol nucleic acid, and M2 represents a modification selected from a 2′-Me sugar modification and a 2′-F sugar modification, and typically M2 can be the same 2′ sugar modification.

[0215] A nucleic acid for inhibiting expression of a target gene, comprising a duplex region that comprises: a first strand that is at least partially complementary to a portion of RNA transcribed from the target gene, and a second strand that is at least partially complementary to the first strand, wherein the second strand comprises: 2 consecutive abasic nucleosides in the 5′ or 3′ terminal region of the second strand, and counting from the 5′ terminus position 1 of the second strand, which is the 5′ most nucleoside not including abasic nucleosides, position 7 on the second strand includes a sugar modification that is a 2′-Me modification.

[0216] Particularly suitable according to the present invention is a nucleic acid for inhibiting expression of a target gene, comprising a duplex region that comprises: a first strand that is at least partially complementary to a portion of RNA transcribed from the target gene, and a second strand that is at least partially complementary to the first strand, wherein said second and first strands comprise the following modification patterns:
[0217] Second strand (5′-3′): ia-ia-Me-Me-Me-Me-Me-Me-Me-Me-F-F-F-Me-Me-Me-Me-Me-Me-Me-Me-Me-Me
[0218] First strand (5′-3′) Me-F-Me-Me-Me-(M1)-Me-(M2)₂-Me-Me-Me-Me-F Me-F-Me-Me-Me-Me-Me-Me-Me
[0219] where M1 represents a thermally destabilising modification, such as typically a modified unlocked nucleic acid or a glycol nucleic acid, and M2 represents a modification selected from a 2′-Me sugar modification and a 2′-F sugar modification, and typically M2 can be the same 2′ sugar modification.

[0220] A nucleic acid for inhibiting expression of a target gene, comprising a duplex region that comprises: a first strand that is at least partially complementary to a portion of RNA transcribed from the target gene, and a second strand that is at least partially complementary to the first strand, wherein the second strand comprises: counting from the 5′ terminus position 1 of the second strand, which is the 5′ most nucleoside not including abasic nucleosides, two phosphorothioate internucleoside linkages that are respectively present between positions 1 and 2, and 2 and 3 of the second strand, or counting from the 3′ terminus position 1 of the second strand, which is the 3′ most nucleoside not including abasic nucleosides, two phosphorothioate internucleoside linkages that are respectively present between positions 1 and 2, and 2 and 3 of the second strand, and counting from the 5′ terminus position 1 of the second strand, which is the 5′ most nucleoside not including abasic nucleosides, position 7 on the second strand includes a sugar modification that is a 2′-Me modification.

[0221] A nucleic acid for inhibiting expression of a target gene, comprising a duplex region that comprises: a first strand that is at least partially complementary to a portion of RNA transcribed from the target gene, and a second strand that is at least partially complementary to the first strand, wherein the second strand comprises: counting from the 5′ terminus position 1 of the second strand, which is the 5′ most nucleoside not including abasic nucleosides, position 7 on the second strand includes a sugar modification that is a 2′-Me modification, and at the 3′ terminus of the second strand the nucleic acid is conjugated directly or indirectly to one or more ligand moieties, wherein the ligand moiety preferably comprises: one or more N-acetyl galactosamine (GalNAc) ligands, and/or one or more N-acetyl galactosamine (GalNAc) ligand derivatives, and/or one or more N-acetyl galactosamine (GalNAc) ligands and/or derivatives thereof, conjugated to the nucleic acid through a linker.

[0222] Each of the above second strand sequences and constructs can be used with any of the first strands as described herein.

[0223] A nucleic acid for inhibiting expression of a target gene, comprising a duplex region that comprises: a first strand that is at least partially complementary to a portion of RNA transcribed from the target gene, and a second strand that is at least partially complementary to the first strand, wherein said second strand has the following modification pattern:
[0224] Modification pattern 1:
[0225] Second strand (5′-3′): ia-ia-F-Me-F-Me-F-Me-F-Me-F-Me-F-Me-F-Me-F-Me-F-Me-F-Me-F, optionally in combination with
[0226] First strand (5′-3′): Me-F-Me-F-Me-F-Me-F-Me-F-Me-F-Me-F-Me-F-Me-F-Me-F-Me-F-Me,
[0227] Or Modification pattern 2:
[0228] Second strand (5′-3′): F-Me-F-Me-F-Me-F-Me-F-Me-F-Me-F-Me-F-Me F-Me-F-Me-F-ia-ia, optionally in combination with
[0229] First strand (5′-3′): Me-F-Me-F-Me-F-Me-F-Me-F-Me-F-Me-F-Me-F-Me-F-Me-F-Me-F-Me
[0230] wherein: ia represents an inverted abasic nucleoside, and when the inverted abasic nucleosides as represented by ia-ia are present at the 3′ terminus of the second strand, said inverted abasic nucleosides are typically present in a 2 nucleoside overhang.

[0231] A nucleic acid for inhibiting expression of a target gene, comprising a duplex region that comprises: a first strand that is at least partially complementary to a portion of RNA transcribed from the target gene, and a second strand that is at least partially complementary to the first strand, wherein said second strand has the following modification pattern:
[0232] Modification pattern 1:
[0233] Second strand (5′-3′): ia-ia-F(s)Me(s) F-Me-F-Me-F-Me-F-Me-F-Me-F-Me F-Me-F-Me-F-Me-F, optionally in combination with
[0234] First strand (5′-3′): Me(s)F(s)Me-F-Me-F-Me-F-Me-F-Me-F-Me-F-Me-F-Me-F-Me-F-Me(s)F(s)Me,
[0235] Or Modification pattern 2:
[0236] Second strand (5′-3′): F-Me-F-Me-F-Me-F-Me-F-Me-F-Me-F-Me-F-Me-F-Me-F(s)Me(s)F-ia-ia, optionally in combination with
[0237] First strand (5′-3′): Me(s)F(s)Me-F-Me-F-Me-F-Me-F-Me-F-Me-F-Me-F-Me-F-Me-F-Me(s)F(s)Me
[0238] wherein: (s) is a phosphorothioate internucleoside linkage, ia represents an inverted abasic nucleoside, and when the inverted abasic nucleosides as represented by ia-ia are present at the 3′ terminus of the second strand, said inverted abasic nucleosides are typically present in a 2 nucleoside overhang.

[0239] Further nucleic acids according to the present invention include a nucleic acid for inhibiting expression of a target gene, comprising a duplex region that comprises:
[0240] a first strand that is at least partially complementary to a portion of RNA transcribed from the target gene, and a second strand that is at least partially complementary to the first strand, wherein nucleosides of said second and first strands comprise a 2′ sugar and bond modification pattern as follows (5′-3′):
[0241] Second strand (5′-3′): Me-Me-Me-Me-Me-Me-F-Me-F-F-F-Me-Me-Me-Me-Me-Me-Me-Me-Me-Me, or
[0242] wherein the 2′-Me or 2′-F modified nucleosides of said first strand include any one of the following modification patterns (5′-3′):
[0243] First strand (5′-3′): Me-F-Me-Me-Me-Me-F-Me-F-Me-Me-Me-Me-F-Me-F-Me-Me-Me-Me-Me-Me-Me, or
[0244] First strand (5′-3′): Me-F-Me-Me-Me-F-Me-F-Me-Me-Me-Me-Me-F-Me-F-Me-Me-Me-Me-Me-Me-Me, or
[0245] First strand (5′-3′): Me-F-Me-Me-Me-F-F-F-F-Me-Me-Me-Me-F-Me-F-Me-Me-Me-Me-Me-Me-Me, or
[0246] First strand (5′-3′): Me-F-Me-Me-Me-Me-F-F-Me-Me-Me-Me-Me-F-Me-F-Me-Me-Me-Me-Me-Me-Me, or
[0247] First strand (5′-3′): Me-F-Me-Me-Me-Me-Me-F-F-Me-Me-Me-Me-F-Me-F-Me-Me-Me-Me-Me-Me-Me, or
[0248] First strand (5′-3′): Me-F-Me-Me-Me-F-F-Me-Me-Me-Me-Me-Me-F-Me-F-Me-Me-Me-Me-Me-Me-Me, or
[0249] First strand (5′-3′): Me-F-Me-Me-Me-Me-Me-Me-Me-Me-Me-Me-Me-F-Me-F-Me-Me-Me-Me-Me-Me-Me,
[0250] First strand (5′-3′): Me(s) F(s) Me-Me-Me-Me-F-Me-F-Me-Me-Me-Me-F-Me-F-Me-Me-Me-Me-Me(s)Me(s) Me, or
[0251] First strand (5′-3′): Me(s) F(s) Me-Me-Me-F-Me-F-Me-Me-Me-Me-Me-F-Me-F-Me-Me-Me-Me-Me(s)Me(s) Me, or
[0252] First strand (5′-3′): Me(s) F(s) Me-Me-Me-F-F-F-F-Me-Me-Me-Me-F-Me-Me-F-Me-Me-Me-Me-Me(s)Me(s) Me, or
[0253] First strand (5′-3′): Me(s) F(s) Me-Me-Me-Me-F-F-Me-Me-Me-Me-Me-F-Me-F-Me-Me-Me-Me-Me(s)Me(s) Me, or
[0254] First strand (5′-3′): Me(s) F(s) Me-Me-Me-Me-Me-F-F-Me-Me-Me-Me-F-Me-F-Me-Me-Me-Me-Me(s)Me(s) Me, or
[0255] First strand (5′-3′): Me(s) F(s) Me-Me-Me-F-F-Me-Me-Me-Me-Me-Me-F-Me-F-Me-Me-Me-Me-Me(s)Me(s) Me, or
[0256] First strand (5′-3′): Me(s) F(s) Me-Me-Me-Me-Me-Me-Me-Me-Me-Me-Me-F-Me-F-Me-Me-Me-Me-Me(s)Me(s) Me,
[0257] wherein: (s) is a phosphorothioate internucleoside linkage.

[0258] Further nucleic acids according to the present invention include a nucleic acid for inhibiting expression of a target gene, comprising a duplex region that comprises: a first strand that is at least partially complementary to a portion of RNA transcribed from the target gene, and a second strand that is at least partially complementary to the first strand, wherein nucleosides of said second and first strands comprise a 2′ sugar, abasic and bond modification pattern as follows (5′-3′):
[0259] Second strand (5′-3′): Me(s)Me(s)Me-Me-Me-Me-F-Me-F-F-F-Me-Me-Me-Me-Me-Me-Me-Me-Me-Me, or
[0260] Second strand (5′-3′): Me-Me-Me-Me-Me-Me-F-Me-F-F-F-Me-Me-Me-Me-Me-Me-Me-Me(s)Me(s)Me, or
[0261] Second strand (5′-3′): ia-ia-Me-Me-Me-Me-Me-Me-F-Me-F-F-F-Me-Me-Me-Me-Me-Me-Me-Me-Me-Me, or
[0262] Second strand (5′-3′): Me-Me-Me-Me-Me-Me-F-Me-F-F-F-Me-Me-Me-Me-Me-Me-Me-Me-Me-Me-ia-ia, or
[0263] Second strand (5′-3′): ia-ia-Me(s)Me(s)Me-Me-Me-Me-F-Me-F-F-F-Me-Me-Me-Me-Me-Me-Me-Me-Me-Me, or
[0264] Second strand (5′-3′): Me-Me-Me-Me-Me-Me-F-Me-F-F-F-Me-Me-Me-Me-Me-Me-Me-Me(s)Me(s)Me-ia-ia
[0265] wherein the 2′-Me or 2′-F modified nucleosides of said first strand include any one of the following modification patterns (5′-3′):
[0266] First strand (5′-3′): Me-F-Me-Me-Me-F-Me-Me-F-Me-Me-Me-Me-F-Me-F-Me-Me-Me-Me-Me-Me-Me, or
[0267] First strand (5′-3′): Me-F-Me-Me-Me-Me-F-Me-F-Me-Me-Me-Me-F-Me-F-Me-Me-Me-Me-Me-Me-Me, or
[0268] First strand (5′-3′): Me-F-Me-Me-Me-F-Me-F-Me-Me-Me-Me-Me-F-Me-F-Me-Me-Me-Me-Me-Me-Me, or
[0269] First strand (5′-3′): Me-F-Me-Me-Me-F-F-F-F-Me-Me-Me-Me-F-Me-F-Me-Me-Me-Me-Me-Me-Me, or
[0270] First strand (5′-3′): Me-F-Me-Me-Me-Me-F-F-Me-Me-Me-Me-Me-F-Me-F-Me-Me-Me-Me-Me-Me-Me, or
[0271] First strand (5′-3′): Me-F-Me-Me-Me-Me-Me-F-F-Me-Me-Me-Me-F-Me-F-Me-Me-Me-Me-Me-Me-Me, or
[0272] First strand (5′-3′): Me-F-Me-Me-Me-F-F-Me-Me-Me-Me-Me-Me-F-Me-F-Me-Me-Me-Me-Me-Me-Me, or
[0273] First strand (5′-3′): Me-F-Me-Me-Me-Me-Me-Me-Me-Me-Me-Me-Me-F-Me-F-Me-Me-Me-Me-Me-Me-Me,
[0274] First strand (5′-3′): Me(s) F(s) Me-Me-Me-F-Me-Me-F-Me-Me-Me-Me-F-Me-F-Me-Me-Me-Me-Me(s)Me(s) Me, or
[0275] First strand (5′-3′): Me(s) F(s) Me-Me-Me-Me-F-Me-F-Me-Me-Me-Me-F-Me-F-Me-Me-Me-Me-Me(s)Me(s) Me, or
[0276] First strand (5′-3′): Me(s) F(s) Me-Me-Me-F-Me-F-Me-Me-Me-Me-Me-F-Me-F-Me-Me-Me-Me-Me(s)Me(s) Me, or
[0277] First strand (5′-3′): Me(s) F(s) Me-Me-Me-F-F-F-F-Me-Me-Me-Me-F-Me-F-Me-Me-Me-Me-Me(s)Me(s) Me, or
[0278] First strand (5′-3′): Me(s) F(s) Me-Me-Me-Me-F-F-Me-Me-Me-Me-Me-F-Me-F-Me-Me-Me-Me-Me(s)Me(s) Me, or
[0279] First strand (5′-3′): Me(s) F(s) Me-Me-Me-Me-Me-F-F-Me-Me-Me-Me-F Me-F-Me-Me-Me-Me-Me(s)Me(s) Me, or
[0280] First strand (5′-3′): Me(s) F(s) Me-Me-Me-F-F-Me-Me-Me-Me-Me-Me-F Me-F-Me-Me-Me-Me-Me(s)Me(s) Me, or
[0281] First strand (5′-3′): Me(s) F(s) Me-Me-Me-Me-Me-Me-Me-Me-Me-Me-Me-F-Me-F-Me-Me-Me-Me-Me(s)Me(s) Me,
[0282] wherein:
[0283] (s) is a phosphorothioate internucleoside linkage,
[0284] ia represents an inverted abasic nucleoside, and when the inverted abasic nucleosides as represented by ia-ia are present at the 3′ terminus of the second strand, said inverted abasic nucleosides are typically present in a 2 nucleoside overhang.

[0285] A nucleic acid according to the present invention can further comprise a first strand comprising at least 17 contiguous nucleosides differing by 0 or 1 nucleosides from any one of the first strand sequences as listed in Table 2.

[0286] A nucleic acid according to the present invention can further comprise a first strand comprising at least 17 contiguous nucleosides differing by 0 or 1 nucleosides from any one of the first strand sequences as listed in Table 3.

[0287] Typically a first strand as described above comprises nucleosides 2-18 of any one of the sequences defined in Tables 2 or 3.

[0288] A nucleic acid according to the present invention can further comprise a second strand comprising a nucleoside sequence of at least 17 contiguous nucleosides differing by 0 or 1 nucleosides from any one of the second strand sequences as listed in Table 2, and wherein the second strand has a region of at least 85% complementarity over the 17 contiguous nucleosides to the first strand.

[0289] A nucleic acid according to the present invention can further comprise a second strand comprising a nucleoside sequence of at least 17 contiguous nucleosides differing by 0 or 1 nucleosides from any one of the second strand sequences as listed in Table 2, and wherein the duplex region comprises at least 14, 15, 16 or 17 complementary base pairs.

[0290] A nucleic acid according to the present invention can further comprise a second strand comprising a nucleoside sequence of at least 17 contiguous nucleosides differing by 0 or 1 nucleosides from any one of the second strand sequences as listed in Table 4, and wherein the second strand has a region of at least 85% complementarity over the 17 contiguous nucleosides to the first strand.

[0291] A nucleic acid according to the present invention can further comprise a second strand comprising a nucleoside sequence of at least 17 contiguous nucleosides differing by 0 or 1 nucleosides from any one of the second strand sequences as listed in Table 4, and wherein the duplex region comprises at least 14, 15, 16 or 17 complementary base pairs.

[0292] A nucleic acid according to the present invention, wherein the first strand comprises any one of the first strand sequences as listed in Table 2.

[0293] A nucleic acid according to the present invention, wherein the first strand comprises any one of the first strand sequences as listed in Table 3.

[0294] A nucleic acid according to the present invention, wherein the second strand comprises any one of the second strand sequences as listed in Table 2.

[0295] A nucleic acid according to the present invention, wherein the second strand comprises any one of the second strand sequences as listed in Table 4.

[0296] A nucleic acid according to the invention, wherein the first strand and the second strand form any one of the duplexes as listed in Table 5.

[0297] A nucleic acid according to the present invention, wherein the nucleic acid is an siRNA oligonucleoside.

[0298] A nucleic acid according to the present invention, wherein the nucleic acid is conjugated directly or indirectly to one or more ligand moieties, optionally wherein said ligand moiety is present at a terminal region of the second strand, typically at the 3′ terminal region thereof, and can typically comprise one or more N-acetyl galactosamine (GalNAc) ligands, and/or one or more N-acetyl galactosamine (GalNAc) ligand derivatives, and/or one or more N-acetyl galactosamine (GalNAc) ligands and/or derivatives thereof, conjugated to the nucleic acid through a linker. Typically the one or more GalNAc ligands and/or GalNAc ligand derivatives are conjugated directly or indirectly to the 5′ or 3′ terminal region of the second strand of the nucleic acid, typically at the 3′ terminal region thereof.

[0299] A nucleic acid according to the present invention, comprising a ligand moiety comprising the following structure:

[chemical structure]

[0300] A nucleic acid according to the present invention, comprising a ligand moiety comprising the following structure:

[chemical structure]

[0301] wherein:
[0302] R₁ at each occurrence is independently selected from the group consisting of hydrogen, methyl and ethyl;
[0303] R₂ is selected from the group consisting of hydrogen, hydroxy, —OC₁₋₃alkyl, —C(═O)OC₁₋₃alkyl, halo and nitro;
[0304] X₁ and X₂ at each occurrence are independently selected from the group consisting of methylene, oxygen and sulfur;
[0305] m is an integer of from 1 to 6;
[0306] n is an integer of from 1 to 10;
[0307] q, r, s, t, v are independently integers from 0 to 4, with the proviso that: q and r cannot both be 0 at the same time; and s, t and v cannot all be 0 at the same time;
[0308] Z is an oligonucleoside.

[0309] A nucleic acid according to the present invention, comprising the structure

[chemical structure]

wherein [oligonucleotide] represents the contiguous nucleosides of the second strand.

[0310] Alternatively, a nucleic acid according to the present invention, comprising a ligand moiety comprising the following structure:

[chemical structure]

[0311] wherein:
[0312] r and s are independently an integer selected from 1 to 16; and
[0313] Z is an oligonucleoside.

[0314] A nucleic acid according to the present invention, comprising the structure

[chemical structure]

[0315] wherein [oligonucleotide] represents the contiguous nucleosides of the second strand.

[0316] The present invention further provides a pharmaceutical composition comprising a nucleic acid as described herein, in combination with a pharmaceutically acceptable excipient or carrier.

[0317] The present invention further provides a nucleic acid or pharmaceutical composition as described herein, for use in therapy.

[0318] The present invention further provides a nucleic acid or pharmaceutical composition as described herein, for use in prevention or treatment of a disease related to a disorder of haemostasis, such as a disease related to a disorder of haemostasis, such as haemophilia.

[0319] The present invention further provides a nucleic acid or pharmaceutical composition as described herein, for use in prevention or treatment of cardiovascular disease.

[0320] The present invention further provides a nucleic acid or pharmaceutical composition as described herein, for use in prevention or treatment of diabetes.

### FIGURES

[0321] FIG. 1: Linker and ligand portions of constructs suitable for use according to the present invention including tether 1a. While FIG. 1 depicts the linker to be conjugated to an oligonucleotide, it is to be understood that the present invention also encompasses conjugates of the same linker with an oligonucleoside as disclosed herein.

[0322] It should also be understood that while FIG. 1 depicts as a product molecules based on the linker and ligand portions as specifically depicted in FIG. 1 attached to an oligonucleoside moiety as also depicted herein, this product may alternatively further comprise, or consist essentially of, molecules wherein the linker and ligand portions are essentially as depicted in FIG. 1 attached to an oligonucleoside moiety but having the F substituent as shown in FIG. 1 on the cyclo-octyl ring replaced by a substituent occurring as a result of hydrolytic displacement, such as an OH substituent. In this way, (a) tether 1a constructs can consist essentially of molecules having linker and ligand portions specifically as depicted in FIG. 1, with a F substituent on the cyclo-octyl ring; or (b) tether 1a constructs can consist essentially of molecules having linker and ligand portions essentially as depicted in FIG. 1 but having the F substituent as shown in FIG. 1 on the cyclo-octyl ring replaced by a substituent occurring as a result of hydrolytic displacement, such as an OH substituent, or (c) tether 1a constructs can comprise a mixture of molecules as defined in (a) and/or (b).

[0323] FIG. 2: Linker and ligand portions of constructs suitable for use according to the present invention including tether 1b. While FIG. 2 depicts the linker to be conjugated to an oligonucleotide, it is to be understood that the present invention also encompasses conjugates of the same linker with an oligonucleoside as disclosed herein.

[0324] The comments made in relation to FIG. 1 and the possible replacement of the F substituent as shown in FIG. 1 on the cyclo-octyl ring replaced by a substituent occurring as a result of hydrolytic displacement, such as an OH substituent, apply equally to tether 1b constructs. In this way, (a) tether 1b constructs can consist essentially of molecules having linker and ligand portions specifically as depicted in FIG. 2, with a F substituent on the cyclo-octyl ring; or (b) tether 1b constructs can consist essentially of molecules having linker and ligand portions essentially as depicted in FIG. 2 but having the F substituent as shown in FIG. 2 on the cyclo-octyl ring replaced by a substituent occurring as a result of hydrolytic displacement, such as an OH substituent, or (c) tether 1b constructs can comprise a mixture of molecules as defined in (a) and/or (b).

[0325] FIG. 3: Linker and ligand portions of constructs suitable for use according to the present invention including tether 2a. While FIG. 3 depicts the linker to be conjugated to an oligonucleotide, it is to be understood that the present invention also encompasses conjugates of the same linker with an oligonucleoside as disclosed herein.

[0326] FIG. 4: Linker and ligand portions of constructs suitable for use according to the present invention including tether 2b. While FIG. 4 depicts the linker to be conjugated to an oligonucleotide, it is to be understood that the present invention also encompasses conjugates of the same linker with an oligonucleoside as disclosed herein.

[0327] FIG. 5: Formulae described in Sentences 1-101 disclosed herein.

[0328] FIG. 6: Formulae described in Clauses 1-56 disclosed herein.

[0329] FIGS. 7a and 7b: Inverted abasic constructs that can be used with nucleic acid sequences according to the present invention as described herein. For FIG. 7a, a galnac linker is attached to the 5′ end region of the sense strand in use (not depicted in FIG. 7a). For FIG. 7b, a galnac linker is attached to the 3′ end region of the sense strand in use (not depicted in FIG. 7b).
[0330] iaia as shown at the 3′ end region of the sense strand in FIG. 7a represents (i) two abasic nucleosides provided as the penultimate and terminal nucleosides at the 3′ end region of the sense strand, (ii) wherein a 3′-3′ reversed linkage is provided between the antepenultimate nucleoside (namely at position 21 of the sense strand, wherein position 1 is the terminal 5′ nucleoside of the sense strand) and the adjacent penultimate abasic residue of the sense strand, and (iii) the linkage between the terminal and penultimate abasic nucleosides is 5′-3′ when reading towards the 3′ end region comprising the terminal and penultimate abasic nucleosides.
[0331] iaia as shown at the 5′ end region of the sense strand in FIG. 7b represents (i) two abasic nucleosides provided as the penultimate and terminal nucleosides at the 5′ end region of the sense strand, (ii) wherein a 5′-5′ reversed linkage is provided between the antepenultimate nucleoside (namely at position 1 of the sense strand, not including the iaia motif at the 5′ end region of the sense strand in the nucleoside position numbering on the sense strand) and the adjacent penultimate abasic residue of the sense strand, and (iii) the linkage between the terminal and penultimate abasic nucleosides is 3′-5′ when reading towards the 5′ end region comprising the terminal and penultimate abasic nucleosides.

[0332] FIGS. 8 (8a and 8b): Duplex constructs according to Table 5.

[0333] FIG. 9 (9a and 9b): Results of dose-response experiments for inhibition of HCII or ZPI mRNA expression in human Huh7 cells. Points represent mean relative expression of HCII or ZPI mRNA compared to untreated wells after treatment with siRNA construct at the indicated concentrations on the x-axis. Error bars represent standard deviation of the mean. Dotted curves represent 95% confidence intervals. Dotted lines and shaded areas represent the mean relative expression+/−standard deviation from untreated wells on the same plate.

[0334] FIG. 10: Inhibition of ZPI expression by ETXM1184 (ETXS1036 & ETXS1035) and ETXM1199 (ETXS2398 & ETXS2397).

[0335] FIG. 11: Inhibition of B4GALT1 expression by ETXM1200 (ETXS2400 & ETXS2399) and ETXM1201 (ETXS2402 & ETXS2401).

[0336] FIG. 12: Inhibition of B4GALT1 expression by ETXM1203 (ETXS2406 & ETXS2405) and ETXM1204 (ETXS2408 & ETXS2407).

[0337] FIG. 13: Joint Protection: Several Endpoints Document Dose-Responsive Effect.

[0338] Prophylactic administration of ETXM1184 shows dose-dependent protection in key tissue readouts at 10 days post-injury. ETXM1184 shows efficacy in the same range as clinical comparators: FVIII replacement therapy as gold-standard for emergency treatments (Advate) and siRNA-based rebalancing agent for prophylaxis that demonstrated good bleed protection in late-stage clinical development (fitusiran). * Scale: 0=Normal; 1=Minimal; 2=Moderate; 3=Marked; 4=Severe. [1] Glasson et al., Osteoarthritis Cartilage. 2010 October; 18 Suppl 3:S17-23. doi: 10.1016/j.joca.2010.05.025. PMID: 20864019.

[0339] FIG. 14: Composite haemarthrosis histopathology score quantifies: Tendonitis, Tendon degeneration, Tenosynovitis, Periostitis, Osteolysis, Osteoclastic bone resorption, Haemorrhage, Haematoma, Haemosiderin deposition, Chondrocyte necrosis, Cartilage OARSI Grade, Subchondral bone sclerosis and Bone marrow hyperplasia. ETX-148 shows significant dose-responsive effect (Bayesian linear model fitted to composite score). Median reduction of composite score compared to control: −1.25 for the ETXM1184 10 mg/kg group (significance level equivalent to p<0.01); −0.91 for the ETXM1184 3 mg/kg group (significance level equivalent to p<0.05). Comparator fitusiran shows median reduction of −1.04 for the 3 mg/kg group (significance level equivalent to p<0.05).

[0340] FIG. 15: Prophylactic administration of ETXM1184 improves haemarthrosis joint pathology in haemophilia A mice. Administration of 3 mg/kg ETXM1184 resulted in improved hemarthrosis knee joint pathology, reduced inflammation, and resulted in smaller areas of haemorrhage.

[0341] FIG. 16: Prophylactic administration of ETXM1184 reduces post-injury bleeding in hemophilia A mice (in-life visual bleeding score (VBS)). A bleeding event was introduced into the knee joint of Hemophilia A mice 8 days after siRNA administration. Bleeding was monitored for 10 days post-injury and terminal histological analysis was conducted. Prophylactic administration of a single 10 mg/kg dose of ETXM1184 effectively reduced visual bleeding score (VBS) comparably to Factor VIII replacement (Advate) by 10 days post-injury.

[0342] FIG. 17: Prophylactic administration of ETXM1184 reduces post-injury bleeding into the knee joint of hemophilia A mice (in-life measurement of injured knee diameter compared to non-injured knee diameter). A bleeding event was introduced into the knee joint of Hemophilia A mice 8 days after siRNA administration. Bleeding was monitored for 10 days post-injury and terminal histological analysis conducted. Prophylactic ETXM1184 administered as a single 10 mg/kg dose effectively reduced blood accumulation in knee joint comparably to Factor VIII replacement (Advate) by 10 days post-injury.

[0343] FIG. 18: Prophylactic administration of ETXM1184 reduces hemarthrosis in a Hemophilia A mouse model (terminal measurements taken 18 days post-siRNA dosing and 10 days post-injury). Prophylactic ETXM1184 administered as a single 10 mg/kg dose effectively reduced joint bleeding and characteristics of hemophilic arthropathy comparably to Factor VIII replacement (Advate) by 10 days post-injury.

### DEFINITIONS

[0344] The “first strand”, also called the antisense strand or guide strand herein and which can be used interchangeably herein, refers to the nucleic acid strand, e.g. the strand of an siRNA, e.g. a dsiRNA, which includes a region that is substantially complementary to a target sequence, e.g. to an mRNA. As used herein, the term “region of complementarity” refers to the region on the antisense strand that is substantially complementary to a sequence, for example a target sequence. Where the region of complementarity is not fully complementary to the target sequence, the mismatches can typically be in the internal or terminal regions of the molecule. In some embodiments, a double stranded nucleic acid e.g. an siRNA agent of the invention includes a nucleoside mismatch in the antisense strand.

[0345] The “second strand” (also called the sense strand or passenger strand herein, and which can be used interchangeably herein), refers to the strand of a nucleic acid e.g. siRNA that includes a region that is substantially complementary to a region of the antisense strand as that term is defined herein.

[0346] In the context of molecule comprising a nucleic acid provided with a ligand moiety, optionally also with a linker moiety, the nucleic acid of the invention may be referred to as an oligonucleoside or an oligonucleoside moiety.

[0347] Oligonucleotides are short nucleic acid polymers. Whilst oligonucleotides contain phosphodiester bonds between the nucleoside component thereof (base plus sugar), the present invention is not limited to oligonucleotides always joined by such a phosphodiester bond between adjacent nucleosides, and other oligomers of nucleosides joined by bonds which are bonds other than a phosphodiester bond are contemplated. For example, a bond between nucleosides may be a phosphorothioate bond. Therefore, the term “oligonucleoside” as used herein covers both oligonucleotides and other oligomers of nucleosides. An oligonucleoside which is a nucleic acid having at least a portion which is an oligonucleotide is preferred according to the present invention. An oligonucleoside having one or more, or a majority of, phosphodiester backbone bonds between nucleosides is also preferred according to the present invention. An oligonucleoside having one or more, or a majority of, phosphodiester backbone bonds between nucleosides, and also having one or more phosphorothioate backbone bonds between nucleosides (typically in a terminal region of the first and/or second strands) is also preferred according to the present invention.

[0348] It is preferred herein that the nucleic acid according to the invention is a double stranded oligonucleoside comprising one or more phosphorothioate backbone bonds between nucleosides. Accordingly, in all instances in which the present application refers to an oligonucleotide, particularly in the chemical structures disclosed herein, the oligonucleotide may equally be an oligonucleoside as defined herein.

[0349] In some embodiments, a double stranded nucleic acid e.g. siRNA agent of the invention includes a nucleoside mismatch in the sense strand. In some embodiments, the nucleoside mismatch is, for example, within 5, 4, 3, 2, or 1 nucleosides from the 3′-end of the nucleic acid e.g. siRNA.

[0350] In another embodiment, the nucleoside mismatch is, for example, in the 3′-terminal nucleoside of the nucleic acid e.g. siRNA.

[0351] A “target sequence” (which may also be called a target RNA or a target mRNA) refers to a contiguous portion of the nucleoside sequence of an mRNA molecule formed during the transcription of a gene, including mRNA that is a product of RNA processing of a primary transcription product.

[0352] The target sequence may be from about 10-35 nucleosides in length, e.g., about 15-30 nucleosides in length. For example, the target sequence can be from about 15-30 nucleosides, 15-29, 15-28, 15-27, 15-26, 15-25, 15-24, 15-23, 15-22, 15-21, 15-20, 15-19, 15-18, 15-17, 18-30, 18-29, 18-28, 18-27, 18-26, 18-25, 18-24, 18-23, 18-22, 18-21, 18-20, 19-30, 19-29, 19-28, 19-27, 19-26, 19-25, 19-24, 19-23, 19-22, 19-21, 19-20, 20-30, 20-29, 20-28, 20-27, 20-26, 20-25, 20-24, 20-23, 20-22, 20-21, 21-30, 21-29, 21-28, 21-27, 21-26, 21-25, 21-24, 21-23, or 21-22 nucleosides in length. Ranges and lengths intermediate to the above recited ranges and lengths are also contemplated to be part of the invention.

[0353] The term “ribonucleoside” or “nucleoside” can also refer to a modified nucleoside, as further detailed below.

[0354] A nucleic acid can be a DNA or an RNA, and can comprise modified nucleosides. RNA is a preferred nucleic acid.

[0355] The terms “iRNA”, “siRNA”, “RNAi agent,” and “iRNA agent,” “RNA interference agent” as used interchangeably herein, refer to an agent that contains RNA, and which mediates the targeted cleavage of an RNA transcript via an RNA-induced silencing complex (RISC) pathway. siRNA directs the sequence-specific degradation of mRNA through RNA interference (RNAi).

[0356] A double stranded RNA is referred to herein as a “double stranded siRNA (dsiRNA) agent”, “double stranded siRNA (dsiRNA) molecule”, “double stranded RNA (dsRNA) agent”, “double stranded RNA (dsRNA) molecule”, “dsiRNA agent”, “dsiRNA molecule”, or “dsiRNA”, which refers to a complex of ribonucleic acid molecules, having a duplex structure comprising two anti-parallel and substantially complementary nucleic acid strands, referred to as having “sense” and “antisense” orientations with respect to a target RNA.

[0357] The majority of nucleosides of each strand of the nucleic acid, e.g. a dsiRNA molecule, are preferably ribonucleosides, but in that case each or both strands can also include one or more non-ribonucleosides, e.g., a deoxyribonucleoside or a modified nucleoside. In addition, as used in this specification, an “siRNA” may include ribonucleosides with chemical modifications.

[0358] The term “modified nucleoside” refers to a nucleoside having, independently, a modified sugar moiety, a modified internucleoside linkage, or modified nucleobase, or any combination thereof. Thus, the term modified nucleoside encompasses substitutions, additions or removal of, e.g., a functional group or atom, to internucleoside linkages, sugar moieties, or nucleobases. Any such modifications, as used in an siRNA type molecule, are encompassed by “iRNA” or “RNAi agent” or “siRNA” or “siRNA agent” for the purposes of this specification and claims.

[0359] The two strands forming the duplex structure may be different portions of one larger molecule, or they may be separate molecules e.g. RNA molecules.

[0360] The term “nucleoside overhang” refers to at least one unpaired nucleoside that extends from the duplex structure of a nucleic acid according to the present invention. A nucleic acid according to the present invention can comprise an overhang of at least one nucleoside; alternatively the overhang can comprise at least two nucleosides, at least three nucleosides, at least four nucleosides, at least five nucleosides or more. A nucleoside overhang can comprise or consist of a nucleoside/nucleoside analog, including a deoxynucleoside. The overhang(s) can be on the sense strand, the antisense strand, or any combination thereof. Furthermore, the nucleoside(s) of an overhang can be present on the 5′-end, 3-end, or both ends of either an antisense or sense strand.

[0361] In certain embodiments, the antisense strand has a 1-10 nucleoside, e.g., 0-3, 1-3, 2-4, 2-5, 4-10, 5-10, 1, 2, 3, 4, 5, 6, 7, 8, 9, or 10 nucleoside, overhang at the 3′-end or the 5′-end.

[0362] “Blunt” or “blunt end” means that there are no unpaired nucleosides at that end of the double stranded nucleic acid, i.e., no nucleoside overhang. The nucleic acids of the invention include those with no nucleoside overhang at one end or with no nucleoside overhangs at either end.

[0363] Unless otherwise indicated, the term “complementary,” when used to describe a first nucleoside sequence in relation to a second nucleoside sequence, refers to the ability of an oligonucleoside comprising the first nucleoside sequence to hybridize and form a duplex structure under certain conditions with an oligonucleoside comprising the second nucleoside sequence, as will be understood by the skilled person. Such conditions can, for example, be stringent conditions, where stringent conditions can include: 400 mM NaCl, 40 mM PIPES pH 6.4, 1 mM EDTA, 50° C. or 70° C. for 12-16 hours followed by washing (see, e.g., “Molecular Cloning: A Laboratory Manual, Sambrook, et al. (1989) Cold Spring Harbor Laboratory Press).

[0364] Complementary sequences within nucleic acid e.g. a dsiRNA, as described herein, include base-pairing of the oligonucleoside comprising a first nucleoside sequence to an oligonucleoside comprising a second nucleoside sequence over the entire length of one or both nucleoside sequences. Such sequences can be referred to as “fully complementary” with respect to each other herein. However, where a first sequence is referred to as “substantially complementary” or “partially complementary” with respect to a second sequence herein, the two sequences can be fully complementary, or they can form one or more mismatched base pairs, such as 2, 4, or 5 mismatched base pairs, but preferably not more than 5, while retaining the ability to hybridize under the conditions most relevant to their ultimate application, e.g., inhibition of gene expression via a RISC pathway. Overhangs shall not be regarded as mismatches with regard to the determination of complementarity. For example, a nucleic acid e.g. dsiRNA comprising one oligonucleoside 17 nucleosides in length and another oligonucleoside 19 nucleosides in length, wherein the longer oligonucleoside comprises a sequence of 17 nucleosides that is fully complementary to the shorter oligonucleoside, can yet be referred to as “fully complementary”.

[0365] “Complementary” sequences, as used herein, can also include, or be formed entirely from, non-Watson-Crick base pairs or base pairs formed from non-natural and modified nucleosides, in so far as the above requirements with respect to their ability to hybridize are fulfilled. Such non-Watson-Crick base pairs include, but are not limited to, G:U Wobble or Hoogstein base pairing.

[0366] The terms “complementary,” “fully complementary” and “substantially/partially complementary” herein can be used with respect to the base matching between the sense strand and the antisense strand of a nucleic acid eg dsiRNA, or between the antisense strand of a double stranded nucleic acid e.g. siRNA agent and a target sequence.

[0367] Within the present invention, the second strand of the nucleic acid according to the invention is at least partially complementary to the first strand of said nucleic acid. In certain embodiments, a first and second strand of a nucleic acid according to the invention are partially complementary if they form a duplex region having a length of at least 17 base pairs and comprising not more than 1, 2, 3, 4, or 5 mismatched base pairs.

[0368] In certain embodiments, a first and second strand of the nucleic acid according to the invention are partially complementary if they form a duplex region having a length of 19 base pairs and comprising not more than 1, 2, 3, 4, or 5 mismatched base pairs. In certain embodiments, a first and second strand of the nucleic acid according to the invention are partially complementary if they form a duplex region having a length of 21 base pairs comprising not more than 1, 2, 3, 4, or 5 mismatched base pairs.

[0369] Alternatively, a first and second strand of the nucleic acid according to the invention are partially complementary if they form a duplex region having a length of at least 17 base pairs, wherein at least 14, 15, 16 or 17 of said base pairs are complementary base pairs, in particular Watson-Crick base pairs.

[0370] In certain embodiments, a first and second strand of the nucleic acid according to the invention are partially complementary if they form a duplex region having a length of 19 base pairs, wherein at least 14, 15, 16, 17, 18 or all 19 base pairs are complementary base pairs, in particular Watson-Crick base pairs. In certain embodiments, a first and second strand of the nucleic acid according to the invention are partially complementary if they form a duplex region having a length of 21 base pairs, wherein at least 16, 17, 18, 19, 20 or all 21 base pairs are complementary base pairs, in particular Watson-Crick base pairs.

[0371] As used herein, a nucleic acid that is “substantially complementary” or “partially complementary” to at least part of a messenger RNA (mRNA) refers to a nucleic acid that is substantially or partially complementary to a contiguous portion of the mRNA of interest (e.g., an mRNA encoding a gene). In certain embodiments, the contiguous portion of the mRNA is a sequence as listed in Table 1, i.e., any one of SEQ ID NOs:3-42 and 443-448. For example, a nucleic acid is complementary to at least a part of an mRNA of a gene of interest if the sequence is substantially or partially complementary to a non-interrupted portion of an mRNA encoding that gene.

[0372] Accordingly, in some preferred embodiments, the antisense oligonucleosides as disclosed herein are fully complementary to the target gene sequence.

[0373] In other embodiments, the antisense oligonucleosides disclosed herein are substantially or partially complementary to a target RNA sequence and comprise a contiguous nucleoside sequence which is at least about 80% complementary over its entire length to the equivalent region of the target RNA sequence, such as at least about 85%, 86%, 87%, 88%, 89%, about 90%, 91%, 92%, 93%, 94%, 95%, 96%, 97%, 98%, or 99% complementary or 100% complementary.

[0374] In certain embodiments, the first (antisense) strand of a nucleic acid according to the invention is partially or fully complementary to a contiguous portion of RNA transcribed from the HCII gene. In certain embodiments, the first strand of the nucleic acid according to the invention is partially or fully complementary to a contiguous portion of at least 17 nucleosides of the HCII mRNA. In certain embodiments, the first strand of the nucleic acid according to the invention is partially or fully complementary to a contiguous portion of 17, 18, 19, 20, 21, 22 or 23 nucleosides of the HCII mRNA. In certain embodiments, the first strand of the nucleic acid according to the invention is partially or fully complementary to a contiguous portion of 17, 18, 19, 20, 21, 22 or 23 nucleosides of any one of the sequences as listed in Table 1, i.e., any one of SEQ ID NOs: 3-22 and 445-446.

[0375] In certain embodiments, the first (antisense) strand of the nucleic acid according to the invention is partially complementary to a contiguous portion of the HCII mRNA if it comprises a contiguous nucleoside sequence of at least 17 nucleosides, wherein at least 14, 15, 16 or 17 nucleosides of said contiguous nucleoside sequence are complementary to a contiguous portion of the HCII mRNA. In certain embodiments, the first strand of the nucleic acid according to the invention comprises a contiguous nucleoside sequence of at least 17 nucleosides, wherein at least 14, 15, 16 or 17 nucleosides of said contiguous nucleoside sequence are complementary to a contiguous portion of any one of the sequences listed in Table 1, i.e., any one of SEQ ID NOs: 3-22 and 445-446. In certain embodiments, the first strand of the nucleic acid according to the invention comprises a contiguous nucleoside sequence of 19 nucleosides, wherein at least 14, 15, 16, 17, 18 or all 19 nucleosides of said contiguous nucleoside sequence are complementary to a contiguous portion of any one of the sequences listed in Table 1, i.e., any one of SEQ ID NOs: 3-22 and 445-446. In certain embodiments, the first strand of the nucleic acid according to the invention comprises a contiguous nucleoside sequence of 23 nucleosides, wherein at least 18, 19, 20, 21, 22 or all 23 nucleosides of said contiguous nucleoside sequence are complementary to a contiguous portion of any one of the sequences listed in Table 1, i.e., any one of SEQ ID NOs: 3-22 and 445-446.

[0376] In certain embodiments, the first (antisense) strand of a nucleic acid according to the invention is partially or fully complementary to a contiguous portion of RNA transcribed from the ZPI gene. In certain embodiments, the first strand of the nucleic acid according to the invention is partially or fully complementary to a contiguous portion of at least 17 nucleosides of the ZPI mRNA. In certain embodiments, the first strand of the nucleic acid according to the invention is partially or fully complementary to a contiguous portion of 17, 18, 19, 20, 21, 22 or 23 nucleosides of the ZPI mRNA. In certain embodiments, the first strand of the nucleic acid according to the invention is partially or fully complementary to a contiguous portion of 17, 18, 19, 20, 21, 22 or 23 nucleosides of any one of the sequences as listed in Table 1, i.e., any one of SEQ ID NOs: 23-42 and 443-444.

[0377] In certain embodiments, the first (antisense) strand of the nucleic acid according to the invention is partially complementary to a contiguous portion of the ZPI mRNA if it comprises a contiguous nucleoside sequence of at least 17 nucleosides, wherein at least 14, 15, 16 or 17 nucleosides of said contiguous nucleoside sequence are complementary to a contiguous portion of the ZPI mRNA. In certain embodiments, the first strand of the nucleic acid according to the invention comprises a contiguous nucleoside sequence of at least 17 nucleosides, wherein at least 14, 15, 16 or 17 nucleosides of said contiguous nucleoside sequence are complementary to a contiguous portion of any one of the sequences listed in Table 1, i.e., any one of SEQ ID NOs: 23-42 and 443-444. In certain embodiments, the first strand of the nucleic acid according to the invention comprises a contiguous nucleoside sequence of 19 nucleosides, wherein at least 14, 15, 16, 17, 18 or all 19 nucleosides of said contiguous nucleoside sequence are complementary to a contiguous portion of any one of the sequences listed in Table 1, i.e., any one of SEQ ID NOs: 23-42 and 443-444. In certain embodiments, the first strand of the nucleic acid according to the invention comprises a contiguous nucleoside sequence of 23 nucleosides, wherein at least 18, 19, 20, 21, 22 or all 23 nucleosides of said contiguous nucleoside sequence are complementary to a contiguous portion of any one of the sequences listed in Table 1, i.e., any one of SEQ ID NOs: 23-42 and 443-444.

[0378] In certain embodiments, the first (antisense) strand of a nucleic acid according to the invention is partially or fully complementary to a contiguous portion of RNA transcribed from the B4GALT1 gene. In certain embodiments, the first strand of the nucleic acid according to the invention is partially or fully complementary to a contiguous portion of at least 17 nucleosides of the B4GALT1 mRNA. In certain embodiments, the first strand of the nucleic acid according to the invention is partially or fully complementary to a contiguous portion of 17, 18, 19, 20, 21, 22 or 23 nucleosides of the B4GALT1 mRNA. In certain embodiments, the first strand of the nucleic acid according to the invention is partially or fully complementary to a contiguous portion of 17, 18, 19, 20, 21, 22 or 23 nucleosides of any one of the sequences as listed in Table 1, i.e., any one of SEQ ID NOs: 447-448.

[0379] In certain embodiments, the first (antisense) strand of the nucleic acid according to the invention is partially complementary to a contiguous portion of the B4GALT1 mRNA if it comprises a contiguous nucleoside sequence of at least 17 nucleosides, wherein at least 14, 15, 16 or 17 nucleosides of said contiguous nucleoside sequence are complementary to a contiguous portion of the B4GALT1 mRNA. In certain embodiments, the first strand of the nucleic acid according to the invention comprises a contiguous nucleoside sequence of at least 17 nucleosides, wherein at least 14, 15, 16 or 17 nucleosides of said contiguous nucleoside sequence are complementary to a contiguous portion of any one of the sequences listed in Table 1, i.e., any one of SEQ ID NOs: 447-448. In certain embodiments, the first strand of the nucleic acid according to the invention comprises a contiguous nucleoside sequence of 19 nucleosides, wherein at least 14, 15, 16, 17, 18 or all 19 nucleosides of said contiguous nucleoside sequence are complementary to a contiguous portion of any one of the sequences listed in Table 1, i.e., any one of SEQ ID NOs: 447-448. In certain embodiments, the first strand of the nucleic acid according to the invention comprises a contiguous nucleoside sequence of 23 nucleosides, wherein at least 18, 19, 20, 21, 22 or all 23 nucleosides of said contiguous nucleoside sequence are complementary to a contiguous portion of any one of the sequences listed in Table 1, i.e., any one of SEQ ID NOs: 447-448.

[0380] In some embodiments, a nucleic acid e.g. an siRNA of the invention includes a sense strand that is substantially or partially complementary to an antisense oligonucleoside which, in turn, is complementary to a target gene sequence and comprises a contiguous nucleoside sequence. The nucleoside sequence of the sense strand is typically at least about 80% complementary over its entire length to the equivalent region of the nucleoside sequence of the antisense strand, such as about 85%, 86%, 87%, 88%, 89%, 90%, 91%, 92%, 93%, 94%, 95%, 96%, 97%, 98%, or 99% complementary, or 100% complementary.

[0381] In some embodiments, a nucleic acid e.g. an siRNA of the invention includes an antisense strand that is substantially or partially complementary to the target sequence and comprises a contiguous nucleoside sequence which is at least 80% complementary over its entire length to the target sequence such as about 85%, 86%, 87%, 88%, 89%, 90%, 91%, 92%, 93%, 94%, 95%, 96%, 97%, 98%, or 99% complementary, or 100% complementary.

[0382] As used herein, a “subject” is an animal, such as a mammal, including a primate (such as a human, a non-human primate, e.g., a monkey, and a chimpanzee), or a non-primate or a bird that expresses the target gene, either endogenously or heterologously, when the target gene sequence has sufficient complementarity to the nucleic acid e.g. siRNA agent to promote target knockdown. In certain preferred embodiments, the subject is a human.

[0383] The terms “treating” or “treatment” refer to a beneficial or desired result including, but not limited to, alleviation or amelioration of one or more symptoms associated with gene expression. “Treatment” can also mean prolonging survival as compared to expected survival in the absence of treatment. Treatment can include prevention of development of co-morbidities, e.g., reduced liver damage in a subject with a hepatic infection.

[0384] “Therapeutically effective amount,” as used herein, is intended to include the amount of a nucleic acid e.g. an siRNA that, when administered to a patient for treating a subject having disease, is sufficient to effect treatment of the disease (e.g., by diminishing, ameliorating or maintaining the existing disease or one or more symptoms of disease or its related comorbidities).

[0385] The phrase “pharmaceutically acceptable” is employed herein to refer to compounds, materials, compositions, or dosage forms which are suitable for use in contact with the tissues of human subjects and animal subjects without excessive toxicity, irritation, allergic response, or other problem or complication, commensurate with a reasonable benefit/risk ratio.

[0386] The phrase “pharmaceutically-acceptable carrier” as used herein means a pharmaceutically-acceptable material, composition, or vehicle, such as a liquid or solid filler, diluent, excipient, manufacturing aid or solvent encapsulating material, involved in carrying or transporting the subject compound from one organ, or portion of the body, to another organ, or portion of the body. Each carrier must be “acceptable” in the sense of being compatible with the other ingredients of the formulation and not injurious to the subject being treated.

[0387] Where a value or range of values of a parameter are recited, it is intended that values and ranges intermediate to the recited values are also intended to be part of this invention.

[0388] The articles “a” and “an” are used herein to refer to one or to more than one (i.e. to at least one) of the grammatical object of the article.

[0389] The term “including” is used herein to mean, and is used interchangeably with, the phrase “including but not limited to”.

[0390] The term “or” is used herein to mean, and is used interchangeably with, the term “and/or,” unless context clearly indicates otherwise. For example, “sense strand or antisense strand” is understood as “sense strand or antisense strand or sense strand and antisense strand.”

[0391] The term “about” is used herein to mean within the typical ranges of tolerances in the art. For example, “about” can be understood as about 2 standard deviations from the mean. In certain embodiments, about means +10%. In certain embodiments, about means +5%. When about is present before a series of numbers or a range, it is understood that “about” can modify each of the numbers in the series or range.

[0392] The term “at least” prior to a number or series of numbers is understood to include the number adjacent to the term “at least”, and all subsequent numbers or integers that could logically be included, as clear from context. For example, the number of nucleosides in a nucleic acid molecule must be an integer. For example, “at least 18 nucleosides of a 21 nucleoside nucleic acid molecule” means that 18, 19, 20, or 21 nucleosides have the indicated property. When at least is present before a series of numbers or a range, it is understood that “at least” can modify each of the numbers in the series or range.

[0393] As used herein, “no more than” or “less than” is understood as the value adjacent to the phrase and logical lower values or integers, as logical from context, to zero. For example, a duplex with an overhang of “no more than 2 nucleosides” has a 2, 1, or 0 nucleoside overhang. When “no more than” is present before a series of numbers or a range, it is understood that “no more than” can modify each of the numbers in the series or range.

[0394] The terminal region of a strand is the last 5 nucleosides from the 5′ or the 3′ end.

[0395] Various embodiments of the invention can be combined as determined appropriate by one of skill in the art.

### Abasic Nucleosides

[0396] In certain embodiments, there are 1, e.g. 2, e.g. 3, e.g. 4 or more abasic nucleosides present in nucleic acids according to the present invention. Abasic nucleosides are modified nucleosides because they lack the base normally seen at position 1 of the sugar moiety. Typically, there will be a hydrogen at position 1 of the sugar moiety of the abasic nucleosides present in a nucleic acid according to the present invention.

[0397] The abasic nucleosides are in the terminal region of the second strand, preferably located within the terminal 5 nucleosides of the end of the strand. The terminal region may be the terminal 5 nucleosides, which includes abasic nucleosides.

[0398] The second strand may comprise, as preferred features (which are all specifically contemplated in combination unless mutually exclusive):
[0399] 2, or more than 2, abasic nucleosides in a terminal region of the second strand; and/or
[0400] 2, or more than 2, abasic nucleosides in either the 5′ or 3′ terminal region of the second strand; and/or
[0401] 2, or more than 2, abasic nucleosides in either the 5′ or 3′ terminal region of the second strand, wherein the abasic nucleosides are present in an overhang as herein described; and/or
[0402] 2, or more than 2, consecutive abasic nucleosides in a terminal region of the second strand, wherein preferably one such abasic nucleoside is a terminal nucleoside; and/or
[0403] 2, or more than 2, consecutive abasic nucleosides in either the 5′ or 3′ terminal region of the second strand, wherein preferably one such abasic nucleoside is a terminal nucleoside in either the 5′ or 3′ terminal region of the second strand; and/or
[0404] a reversed internucleoside linkage connects at least one abasic nucleoside to an adjacent basic nucleoside in a terminal region of the second strand; and/or
[0405] a reversed internucleoside linkage connects at least one abasic nucleoside to an adjacent basic nucleoside in either the 5′ or 3′ terminal region of the second strand; and/or
[0406] an abasic nucleoside as the penultimate nucleoside which is connected via the reversed linkage to the nucleoside which is not the terminal nucleoside (called the antepenultimate nucleoside herein); and/or
[0407] abasic nucleosides as the 2 terminal nucleosides connected via a 5′-3′ linkage when reading the strand in the direction towards the terminus comprising the terminal nucleosides;
[0408] abasic nucleosides as the 2 terminal nucleosides connected via a 3′-5′ linkage when reading the strand in the direction towards the terminus comprising the terminal nucleosides;
[0409] abasic nucleosides as the terminal 2 positions, wherein the penultimate nucleoside is connected via the reversed linkage to the antepenultimate nucleoside, and wherein the reversed linkage is a 5-5′ reversed linkage or a 3′-3′ reversed linkage;
[0410] abasic nucleosides as the terminal 2 positions, wherein the penultimate nucleoside is connected via the reversed linkage to the antepenultimate nucleoside, and wherein either
[0411] (1) the reversed linkage is a 5-5′ reversed linkage and the linkage between the terminal and penultimate abasic nucleosides is 3′5′ when reading towards the terminus comprising the terminal and penultimate abasic nucleosides; or
[0412] (2) the reversed linkage is a 3-3′ reversed linkage and the linkage between the terminal and penultimate abasic nucleosides is 5′3′ when reading towards the terminus comprising the terminal and penultimate abasic nucleosides.

[0413] Preferably there is an abasic nucleoside at the terminus of the second strand.

[0414] Preferably there are 2 or at least 2 abasic nucleosides in the terminal region of the second strand, preferably at the terminal and penultimate positions.

[0415] Preferably 2 or more abasic nucleosides are consecutive, for example all abasic nucleosides may be consecutive. For example, the terminal 1 or terminal 2 or terminal 3 or terminal 4 nucleosides may be abasic nucleosides.

[0416] An abasic nucleoside may also be linked to an adjacent nucleoside through a 5′-3′ phosphodiester linkage or reversed linkage unless there is only 1 abasic nucleoside at the terminus, in which case it will have a reversed linkage to the adjacent nucleoside.

[0417] A reversed linkage (which may also be referred to as an inverted linkage, which is also seen in the art), comprises either a 5′-5′, a 3′3′, a 3′-2′ or a 2′-3′ phosphodiester linkage between the adjacent sugar moieties of the nucleosides.

[0418] Abasic nucleosides which are not terminal will have 2 phosphodiester bonds, one with each adjacent nucleoside, and these may be a reversed linkage or may be a 5′-3 phosphodiester bond or may be one of each.

[0419] A preferred embodiment comprises 2 abasic nucleosides at the terminal and penultimate positions of the second strand, and wherein the reversed internucleoside linkage is located between the penultimate (abasic) nucleoside and the antepenultimate nucleoside.

[0420] Preferably there are 2 abasic nucleosides at the terminal and penultimate positions of the second strand and the penultimate nucleoside is linked to the antepenultimate nucleoside through a reversed internucleoside linkage and is linked to the terminal nucleoside through a 5′-3′ or 3′-5′ phosphodiester linkage (reading in the direction of the terminus of the molecule).

[0421] Preferably a nucleic acid according to the present invention comprises one or more abasic nucleosides, optionally wherein the one or more abasic nucleosides are in a terminal region of the second strand, and/or wherein at least one abasic nucleoside is linked to an adjacent basic nucleoside through a reversed internucleoside linkage.

[0422] Typically the second strand comprises 2 consecutive abasic nucleosides in the 5′ terminal region of the second strand, wherein one such abasic nucleoside is a terminal nucleoside at the 5′ terminal region of the second strand and the other abasic nucleoside is a penultimate nucleoside at the 5′ terminal region of the second strand, wherein: (a) said penultimate abasic nucleoside is connected to an adjacent first basic nucleoside in an adjacent 5′ near terminal region through a reversed internucleoside linkage; and (b) the reversed linkage is a 5-5′ reversed linkage; and (c) the linkage between the terminal and penultimate abasic nucleosides is 3′5′ when reading towards the terminus comprising the terminal and penultimate abasic nucleosides. More typically, (i) the first strand and the second strand each has a length of 23 nucleosides; (ii) two phosphorothioate internucleoside linkages are respectively between three consecutive positions in said 5′ near terminal region of the second strand, wherein a first phosphorothioate internucleoside linkage is present between said adjacent first basic nucleoside of (a) and an adjacent second basic nucleoside in said 5′ near terminal region of the second strand, and a second phosphorothioate internucleoside linkage is present between said adjacent second basic nucleoside and an adjacent third basic nucleoside in said 5′ near terminal region of the second strand; (iii) two phosphorothioate internucleoside linkages are respectively between three consecutive positions in both 5′ and 3′ terminal regions of the first strand, whereby a terminal nucleoside respectively at each of the 5′ and 3′ terminal regions of said first strand is each attached to a respective 5′ and 3′ adjacent penultimate nucleoside by a phosphorothioate internucleoside linkage, and each first 5′ and 3′ penultimate nucleoside is attached to a respective 5′ and 3′ adjacent antepenultimate nucleoside by a phosphorothioate internucleoside linkage; and (iv) the second strand of the nucleic acid is conjugated directly or indirectly to one or more ligand moieties at the 3′ terminal region of the second strand.

[0423] Alternatively the second strand comprises 2 consecutive abasic nucleosides preferably in an overhang in the 3′ terminal region of the second strand, wherein one such abasic nucleoside is a terminal nucleoside at the 3′ terminal region of the second strand and the other abasic nucleoside is a penultimate nucleoside at the 3′ terminal region of the second strand, wherein: (a) said penultimate abasic nucleoside is connected to an adjacent first basic nucleoside in an adjacent 3′ near terminal region through a reversed internucleoside linkage; and (b) the reversed linkage is a 3-3′ reversed linkage; and (c) the linkage between the terminal and penultimate abasic nucleosides is 5′-3′ when reading towards the terminus comprising the terminal and penultimate abasic nucleosides. More typically, (i) the first strand and the second strand each has a length of 23 nucleosides; (ii) two phosphorothioate internucleoside linkages are respectively between three consecutive positions in said 3′ near terminal region of the second strand, wherein a first phosphorothioate internucleoside linkage is present between said adjacent first basic nucleoside of (a) and an adjacent second basic nucleoside in said 3′ near terminal region of the second strand, and a second phosphorothioate internucleoside linkage is present between said adjacent second basic nucleoside and an adjacent third basic nucleoside in said 3′ near terminal region of the second strand; (iii) two phosphorothioate internucleoside linkages are respectively between three consecutive positions in both 5′ and 3′ terminal regions of the first strand, whereby a terminal nucleoside respectively at each of the 5′ and 3′ terminal regions of said first strand is each attached to a respective 5′ and 3′ adjacent penultimate nucleoside by a phosphorothioate internucleoside linkage, and each first 5′ and 3′ penultimate nucleoside is attached to a respective 5′ and 3′ adjacent antepenultimate nucleoside by a phosphorothioate internucleoside linkage; and (iv) the second strand of the nucleic acid is conjugated directly or indirectly to one or more ligand moieties at the 5′ terminal region of the second strand.

[0424] Examples of the structures are as follows (where the specific RNA nucleosides shown are not limiting and could be any RNA nucleoside):
[0425] A A 3′-3′ reversed bond (and also showing the 5′-3 direction of the last phosphodiester bond between the two abasic molecules reading towards the terminus of the molecule)

[chemical structure]

[0426] B Illustrating a 5′-5′ reversed bond (and also showing the 3′-5′ direction of the last phosphodiester bond between the two abasic molecules reading towards the terminus of the molecule)

[chemical structure]

[0427] The abasic nucleoside or abasic nucleosides present in the nucleic acid are provided in the presence of a reversed internucleoside linkage or linkages, namely a 5′-5′ or a 3′-3′ reversed internucleoside linkage. A reversed linkage occurs as a result of a change of orientation of an adjacent nucleoside sugar, such that the sugar will have a 3′-5′ orientation as opposed to the conventional 5′-3′ orientation (with reference to the numbering of ring atoms on the nucleoside sugars). The abasic nucleoside or nucleosides as present in the nucleic acids of the invention preferably include such inverted nucleoside sugars.

[0428] In the case of a terminal nucleoside having an inverted orientation, then this will result in an “inverted” end configuration for the overall nucleic acid. Whilst certain structures drawn and referenced herein are represented using conventional 5′-3′ direction (with reference to the numbering of ring atoms on the nucleoside sugars), it will be appreciated that the presence of a terminal nucleoside having a change of orientation and a proximal 3′-3′ reversed linkage, will result in a nucleic acid having an overall 5′-5′ end structure (i.e. the conventional 3′ end nucleoside becomes a 5′ end nucleoside). Alternatively, it will be appreciated that the presence of a terminal nucleoside having a change of orientation and a proximal 5′-5′ reversed linkage will result in a nucleic acid with an overall 3′-3′ end structure.

[0429] The proximal 3′-3′ or 5′-5′ reversed linkage as herein described, may comprise the reversed linkage being directly adjacent/attached to a terminal nucleoside having an inverted orientation, such as a single terminal nucleoside having an inverted orientation. Alternatively, the proximal 3′-3′ or 5′-5′ reversed linkage as herein described, may comprise the reversed linkage being adjacent 2, or more than 2, nucleosides having an inverted orientation, such as 2, or more than 2, terminal region nucleosides having an inverted orientation, such as the terminal and penultimate nucleosides. In this way, the reversed linkage may be attached to a penultimate nucleoside having an inverted orientation. While a skilled addressee will appreciate that inverted orientations as described above can result in nucleic acid molecules having overall 3′-3′ or 5′-5′ end structures as described herein, it will also be appreciated that with the presence of one or more additional reversed linkages and/or nucleosides having an inverted orientation, then the overall nucleic acid may have 3′-5′ end structures corresponding to the conventionally positioned 5′/3′ ends.

[0430] In one aspect the nucleic acid may have a 3′-3′ reversed linkage, and the terminal sugar moiety may comprise a 5′ OH rather than a 5′ phosphate group at the 5′ position of that terminal sugar.

[0431] A skilled person would therefore clearly understand that 5′-5′, 3′-3′ and 3′-5′ (reading in the direction of that terminus) end variants of the more conventional 5′-3′ structures (with reference to the numbering of ring atoms on the end nucleoside sugars) drawn herein are included in the scope of the disclosure, where a reversed linkage or linkages is/are present.

[0432] In the situation of eg a reversed internucleoside linkage and/or one or more nucleosides having an inverted orientation creating an inverted end, and where the relative position of a linkage (eg to a linker) or the location of an internal feature (such as a modified nucleoside) is defined relative to the 5′ or 3′ end of the nucleic acid, then the 5′ or 3′ end is the conventional 5′ or 3′ end which would have existed had a reversed linkage not been in place, and wherein the conventional 5′ or 3′ end is determined by consideration of the directionality of the majority of the internal nucleoside linkages and/or nucleoside orientation within the nucleic acid. It is possible to tell from these internal bonds and/or nucleoside orientation which ends of the nucleic acid would constitute the conventional 5′ and 3′ ends (with reference to the numbering of ring atoms on the end nucleoside sugars) of the molecule absent the reversed linkage.

[0433] For example, in the structure shown below there are abasic residues in the first 2 positions located at the 5′ end. Where the terminal nucleoside has an inverted orientation then the 5′ end indicated in the diagram below, which is the conventional 5′ end, can in fact comprise a 3′ OH in view of the inverted nucleoside at the terminal position. Nevertheless the majority of the molecule will comprise conventional internucleoside linkages that run from the 3′ OH of the sugar to the 5′ phosphate of the next sugar, when reading in the standard 5′ [PO4] to 3′ [OH] direction of a nucleic acid molecule (with reference to the numbering of ring atoms on the nucleoside sugars), which can be used to determine the conventional 5′ and 3′ ends that would be found absent the inverted end configuration.
[0434] 5′ A-A-Me-Me-Me-Me-Me-Me-F-Me-F-F-F-Me-Me-Me-Me-Me-Me-Me-Me-Me-Me 3′

[0435] The reversed bond is preferably located at the end of the nucleic acid eg RNA which is distal to a ligand moiety, such as a GalNAc containing portion, of the molecule.

[0436] GalNAc-siRNA constructs with a 5′-GalNAc on the sense strand can have a reversed linkage on the opposite end of the sense strand.

[0437] GalNAc-siRNA constructs with a 3′-GalNAc on the sense strand can have a reversed linkage on the opposite end of the sense strand.

[0438] In certain embodiments, the invention relates to a nucleic acid for inhibiting expression of a target gene, comprising a duplex region that comprises:
[0439] a first strand that is at least partially complementary to a portion of RNA transcribed from the target gene, and a second strand that is at least partially complementary to the first strand,
[0440] wherein the second strand comprises 2 consecutive abasic nucleosides in the 5′ terminal region of the second strand, wherein one such abasic nucleoside is a terminal nucleoside at the 5′ terminal region of the second strand and the other abasic nucleoside is a penultimate nucleoside at the 5′ terminal region of the second strand, wherein:
[0441] (a) said penultimate abasic nucleoside is connected to an adjacent first basic nucleoside in an adjacent 5′ near terminal region through a reversed internucleoside linkage;
[0442] (b) the reversed linkage is a 5-5′ reversed linkage; and
[0443] (c) the linkage between the terminal and penultimate abasic nucleosides is 3′-5′ when reading towards the terminus comprising the terminal and penultimate abasic nucleosides.

[0444] In certain embodiments, the invention relates to a nucleic acid for inhibiting expression of a target gene, comprising a duplex region that comprises:
[0445] a first strand that is at least partially complementary to a portion of RNA transcribed from the target gene, and a second strand that is at least partially complementary to the first strand, wherein:
[0446] (i) preferably the first strand and the second strand each has a length of 23 nucleosides (this length for the second strand includes the two abasic nucleosides);
[0447] (ii) the second strand comprises 2 consecutive abasic nucleosides in the 5′ terminal region of the second strand, wherein one such abasic nucleoside is a terminal nucleoside at the 5′ terminal region of the second strand and the other abasic nucleoside is a penultimate nucleoside at the 5′ terminal region of the second strand, wherein:
   [0448] (a) said penultimate abasic nucleoside is connected to an adjacent first basic nucleoside in an adjacent 5′ near terminal region through a reversed internucleoside linkage; and
   [0449] (b) the reversed linkage is a 5-5′ reversed linkage; and
   [0450] (c) the linkage between the terminal and penultimate abasic nucleosides is 3-′5′ when reading towards the terminus comprising the terminal and penultimate abasic nucleosides;
[0451] (iii) two phosphorothioate internucleoside linkages are respectively present between three consecutive positions in said 5′ near terminal region of the second strand, wherein a first phosphorothioate internucleoside linkage is present between said first basic nucleoside of (a) and an adjacent second basic nucleoside in said 5′ near terminal region of the second strand, and a second phosphorothioate internucleoside linkage is present between said second basic nucleoside and an adjacent third basic nucleoside in said 5′ near terminal region of the second strand;
[0452] (iv) two phosphorothioate internucleoside linkages are respectively present between three consecutive positions in both 5′ and 3′ terminal regions of the first strand, whereby a terminal nucleoside respectively at each of the 5′ and 3′ terminal regions of said first strand is each attached to a respective 5′ and 3′ adjacent penultimate nucleoside by a phosphorothioate internucleoside linkage, and each 5′ and 3′ penultimate nucleoside is attached to a respective 5′ and 3′ adjacent antepenultimate nucleoside by a phosphorothioate internucleoside linkage;
[0453] and
[0454] (v) the second strand of the nucleic acid is conjugated directly or indirectly to the one or more ligand moieties at the 3′ terminal region of the second strand.

[0455] In certain embodiments, the invention relates to a nucleic acid for inhibiting expression of a target gene, comprising a duplex region that comprises:
[0456] a first strand that is at least partially complementary to a portion of RNA transcribed from the target gene, and a second strand that is at least partially complementary to the first strand,
[0457] wherein the second strand comprises 2 consecutive abasic nucleosides in the 5′ terminal region of the second strand present as the following 5′ terminal motif

[chemical structure]

[0458] wherein:
[0459] B represents a nucleoside base,
[0460] T represent H, OH or a 2′ ribose modification,
[0461] Z represents the remaining nucleosides of said second strand.

[0462] In certain embodiments, the invention relates to a nucleic acid for inhibiting expression of a target gene, comprising a duplex region that comprises:
[0463] a first strand that is at least partially complementary to a portion of RNA transcribed from the target gene, and a second strand that is at least partially complementary to the first strand,
[0464] wherein the second strand comprises 2 consecutive abasic nucleosides in the 5′ terminal region of the second strand present as the following 5′ terminal motif

[chemical structure]

[0465] wherein:
[0466] B represents a nucleoside base,
[0467] T represent H, OH or a 2′ ribose modification,
[0468] V represent O or S (preferably O),
[0469] R represent H or C₁₋₄ alkyl (preferably H),
[0470] Z represents the remaining nucleosides of said second strand,
[0471] more preferably the following 5′ terminal motif

[chemical structure]

[0472] wherein:
[0473] B represents a nucleoside base,
[0474] T represent H, OH or a 2′ ribose modification,
[0475] Z represents the remaining nucleosides of said second strand.

[0476] In certain embodiments, the invention relates to a nucleic acid for inhibiting expression of a target gene, comprising a duplex region that comprises:
[0477] a first strand that is at least partially complementary to a portion of RNA transcribed from the target gene, and a second strand that is at least partially complementary to the first strand,
[0478] wherein the second strand comprises 2 consecutive abasic nucleosides in the 5′ terminal region of the second strand present as the following 5′ terminal motif

[chemical structure]

[0479] wherein:
[0480] B represents a nucleoside base,
[0481] T represent H, OH or a 2′ ribose modification,
[0482] V represent 0 or S (preferably 0),
[0483] R represent H or Cia alkyl (preferably H),
[0484] Z comprises 11 to 26 contiguous nucleosides, preferably 15 to 21 contiguous nucleosides, and more preferably 19 contiguous nucleosides,
[0485] more preferably the following 5′ terminal motif

[chemical structure]

[0486] wherein:
[0487] B represents a nucleoside base,
[0488] T represent H, OH or a 2′ ribose modification,
[0489] Z comprises 11 to 26 contiguous nucleosides, preferably 15 to 21 contiguous nucleosides, and more preferably 19 contiguous nucleosides.

[0490] In some embodiments, the modification pattern of the second (sense) strand of the nucleic acid according to the invention comprises or consists of
[0491] ia-ia-Me-Me-Me-Me-Me-Me-F-Me-F-F-F-F-Me-Me-Me-Me-Me-Me-Me-Me-Me, wherein ia represents an inverted abasic nucleoside.

[0492] In such embodiments, the second strand preferably comprises the following 5′ terminal motif

[chemical structure]

[0493] wherein:
[0494] B represents the nucleoside base of the first basic nucleosides in the 5′ terminal region of the second strand,
[0495] T represents a 2′Me ribose modification,
[0496] Z represents the remaining contiguous basic nucleosides of the second strand.

[0497] In such embodiments, the modification pattern of the first strand of the nucleic acid preferably comprises or consists of

Me-F-Me-F-Me-F-Me-Me-Me-Me-Me-Me-Me-F-Me-F-Me-
Me-Me-Me-Me-Me-Me.

[0498] In some embodiments, the modification pattern of the second (sense) strand of the nucleic acid according to the invention comprises or consists of
[0499] ia-ia-Me-Me-Me-Me-Me-Me-Me-Me-F-F-F-Me-Me-Me-Me-Me-Me-Me-Me-Me-Me, wherein ia represents an inverted abasic nucleoside.

[0500] In such embodiments, the second strand preferably comprises the following 5′ terminal motif

[chemical structure]

[0501] wherein:
[0502] B represents the nucleoside base of the first basic nucleosides in the 5′ terminal region of the second strand,
[0503] T represents a 2′Me ribose modification,
[0504] Z represents the remaining contiguous basic nucleosides of the second strand.

[0505] In such embodiments, the modification pattern of the first strand of the nucleic acid preferably comprises or consists of

Me-F-Me-Me-Me-F-Me-Me-F-Me-Me-Me-Me-F-Me-F-Me-Me-
Me-Me-Me-Me-Me.

[0506] In some embodiments, the modification pattern of the second (sense) strand of the nucleic acid according to the invention comprises or consists of
[0507] ia-ia-Me(s)-Me(s)-Me-Me-Me-Me-F-Me-F-F-F-F-Me-Me-Me-Me-Me-Me-Me-Me-Me, wherein (s) is a phosphorothioate internucleoside linkage and ia represents an inverted abasic nucleoside.

[0508] In such embodiments, the second strand preferably comprises the following 5′ terminal motif

[chemical structure]

[0509] wherein:
[0510] B represents the nucleoside bases of the first two basic nucleosides in the 5′ terminal region of the second strand,
[0511] T represents a 2′Me ribose modification,
[0512] V represents O or S (preferably O),
[0513] R represents H or C₁₋₄ alkyl (preferably H),
[0514] Z comprises 11 to 26 contiguous basic nucleosides, preferably 15 to 21 contiguous basic nucleosides, and more preferably 19 contiguous basic nucleosides,
[0515] more preferably the following 5′ terminal motif

[chemical structure]

[0516] wherein:
[0517] B represents the nucleoside bases of the first two basic nucleosides in the 5′ terminal region of the second strand,
[0518] T represents a 2′Me ribose modification,
[0519] Z represents the remaining 19 contiguous basic nucleosides of the second strand.

[0520] In such embodiments, the modification pattern of the first strand of the nucleic acid preferably comprises or consists of
[0521] Me(s)F(s)Me-F-Me-F-Me-Me-Me-Me-Me-Me-Me-F-Me-F-Me-Me-Me-Me-Me(s)Me(s)Me, wherein (s) is a phosphorothioate internucleoside linkage.

[0522] In some embodiments, the modification pattern of the second (sense) strand of the nucleic acid according to the invention comprises or consists of
[0523] ia-ia-Me(s)-Me(s)-Me-Me-Me-Me-Me-Me-F-F-F-Me-Me-Me-Me-Me-Me-Me-Me-Me-Me, wherein (s) is a phosphorothioate internucleoside linkage and ia represents an inverted abasic nucleoside.

[0524] In such embodiments, the second strand preferably comprises the following 5′ terminal motif

[chemical structure]

[0525] wherein:
[0526] B represents the nucleoside bases of the first two basic nucleosides in the 5′ terminal region of the second strand,
[0527] T represents a 2′Me ribose modification,
[0528] V represents O or S (preferably O),
[0529] R represents H or C₁₋₄ alkyl (preferably H),
[0530] Z comprises 11 to 26 contiguous basic nucleosides, preferably 15 to 21 contiguous basic nucleosides, and more preferably 19 contiguous basic nucleosides,
[0531] more preferably the following 5′ terminal motif

[chemical structure]

[0532] wherein:
[0533] B represents the nucleoside bases of the first two basic nucleosides in the 5′ terminal region of the second strand,
[0534] T represents a 2′Me ribose modification,
[0535] Z represents the remaining 19 contiguous basic nucleosides of the second strand.

[0536] In such embodiments, the modification pattern of the first strand of the nucleic acid preferably comprises or consists of
[0537] Me(s)F(s)Me-Me-Me-F-Me-Me-F-Me-Me-Me-Me-F-Me-F-Me-Me-Me-Me-Me(s)Me(s)Me, wherein (s) is a phosphorothioate internucleoside linkage.

[0538] The reversed bond is preferably located at the end of the nucleic acid eg RNA which is distal to a ligand moiety, such as a GalNAc containing portion, of the molecule.

[0539] GalNAc-siRNA constructs with a 5′-GalNAc on the sense strand can have a reversed linkage on the opposite end of the sense strand.

[0540] GalNAc-siRNA constructs with a 3′-GalNAc on the sense strand can have a reversed linkage on the opposite end of the sense strand.

[0541] In a preferred embodiment, the modification pattern of the second (sense) strand of the nucleic acid according to the invention comprises or consists of

ia-ia-Me(s)-Me(s)-Me-Me-Me-Me-F-Me-F-F-F-F-Me-Me-
Me-Me-Me-Me-Me-Me-Me,

[0542] or
[0543] ia-ia-Me(s)-Me(s)-Me-Me-Me-Me-Me-Me-F-F-F-Me-Me-Me-Me-Me-Me-Me-Me-Me-Me, wherein (s) is a phosphorothioate internucleoside linkage and ia
[0544] represents an inverted abasic nucleoside.

[0545] In such embodiments, the second strand preferably comprises the following 5′ terminal motif

[chemical structure]

[0546] wherein:
[0547] B represents the nucleoside bases of the first two basic nucleosides in the 5′ terminal region of the second strand,
[0548] T represents a 2′Me ribose modification,
[0549] V represent O or S (preferably O),
[0550] R represent H or C₁₋₄ alkyl (preferably H),
[0551] Z comprises 11 to 26 contiguous basic nucleosides, preferably 15 to 21 contiguous basic nucleosides, and more preferably 19 contiguous basic nucleosides,
[0552] more preferably the following 5′ terminal motif

[chemical structure]

[0553] wherein:
[0554] B represents the nucleoside bases of the first two basic nucleosides in the 5′ terminal region of the second strand,
[0555] T represents a 2′Me ribose modification,
[0556] Z represents the remaining 19 contiguous basic nucleosides of the second strand.

[0557] In such embodiments, the modification pattern of the first strand of the nucleic acid preferably comprises or consists of
[0558] Me(s)F(s)Me-F-Me-F-Me-Me-Me-Me-Me-Me-Me-F-Me-F-Me-Me-Me-Me-Me(s)Me(s)Me, wherein (s) is a phosphorothioate internucleoside linkage,
[0559] or
[0560] Me(s)F(s)Me-Me-Me-F-Me-Me-F-Me-Me-Me-Me-F-Me-F-Me-Me-Me-Me-Me(s)Me(s)Me, wherein (s) is a phosphorothioate internucleoside linkage.

### Nucleic Acid Lengths

[0561] In one aspect the i) the first strand of the nucleic acid has a length in the range of 17 to 30 nucleosides, preferably 19 to 25 nucleosides, more preferably 19 or 23 nucleosides; and/or ii) the second strand of the nucleic acid has a length in the range of 17 to 30 nucleosides, preferably 19 to 25 nucleosides, more preferably 19 or 21 nucleosides.

[0562] Typically the duplex region of the nucleic acid is between 17 and 30 nucleosides in length, more preferably is 19 or 21 nucleosides in length. Similarly, the region of complementarity between the first strand and the portion of RNA transcribed from a target gene is between 17 and 30 nucleosides in length.

### Nucleic Acid Modifications

[0563] In certain embodiments, the nucleic acid e.g. an RNA of the invention e.g., a dsiRNA, does not comprise further modifications, e.g., chemical modifications or conjugations known in the art and described herein.

[0564] In other preferred embodiments, the nucleic acid e.g. RNA of the invention, e.g., a dsiRNA, is further chemically modified to enhance stability or other beneficial characteristics.

[0565] In certain embodiments of the invention, substantially all of the nucleosides are modified.

[0566] The nucleic acids featured in the invention can be synthesized or modified by methods well established in the art, such as those described in “Current protocols in nucleic acid chemistry,” Beaucage, S. L. et al. (Edrs.), John Wiley & Sons, Inc., New York, NY, USA, which is hereby incorporated herein by reference.

[0567] Modifications include, for example, end modifications, e.g., 5′-end modifications (phosphorylation, conjugation, inverted linkages) or 3′-end modifications (conjugation, DNA nucleosides within an RNA, or RNA nucleosides within a DNA, inverted linkages, etc.); base modifications, e.g., replacement with stabilizing bases, destabilizing bases, or bases that base pair with an expanded repertoire of partners, conjugated bases; sugar modifications (e.g., at the 2′-position or 4′-position) or replacement of the sugar; or backbone modifications, including modification or replacement of the phosphodiester linkages.

[0568] Specific examples of nucleic acids such as siRNA compounds useful in the embodiments described herein include, but are not limited to RNAs containing modified backbones or no natural internucleoside linkages. Nucleic acids such as RNAs having modified backbones include, among others, those that do not have a phosphorus atom in the backbone. For the purposes of this specification, and as sometimes referenced in the art, modified nucleic acids e.g. RNAs that do not have a phosphorus atom in their internucleoside backbone can also be considered to be oligonucleosides. In some embodiments, a modified nucleic acid e.g. an siRNA will have a phosphorus atom in its internucleoside backbone.

[0569] Modified nucleic acid e.g. RNA backbones include, for example, phosphorothioates, chiral phosphorothioates, phosphorodithioates, phosphotriesters, aminoalkylphosphotriesters, methyl and other alkyl phosphonates including 3′-alkylene phosphonates and chiral phosphonates, phosphinates, phosphoramidates including 3′-amino phosphoramidate and aminoalkylphosphoramidates, thionophosphoramidates, thionoalkylphosphonates, thionoalkylphosphotriesters, and boranophosphates having normal 3′-5′ linkages, 2′-5′-linked analogs of these, and those having inverted polarity wherein the adjacent pairs of nucleoside units are linked 5′-3′ or 5-2′. Various salts, mixed salts and free acid forms are also included.

[0570] Modified nucleic acids e.g. RNAs can also contain one or more substituted sugar moieties. The nucleic acids e.g. siRNAs, e.g., dsiRNAs, featured herein can include one of the following at the 2′-position: OH; F; O-, S-, or N-alkyl; O-, S-, or N-alkenyl; O-, S- or N-alkynyl; or O-alkyl-O-alkyl, wherein the alkyl, alkenyl and alkynyl can be substituted or unsubstituted. 2′O-methyl and 2′-F are preferred modifications.

[0571] In certain preferred embodiments, the nucleic acid comprises at least one modified nucleoside.

[0572] The nucleic acid of the invention may comprise one or more modified nucleosides on the first strand and/or the second strand.

[0573] In some embodiments, substantially all of the nucleosides of the sense strand and all of the nucleosides of the antisense strand comprise a modification.

[0574] In some embodiments, all of the nucleosides of the sense strand and substantially all of the nucleosides of the antisense strand comprise a modification.

[0575] In some embodiments, all of the nucleosides of the sense strand and all of the nucleosides of the antisense strand comprise a modification.

[0576] In one embodiment, at least one of the modified nucleosides is selected from the group consisting of a deoxy-nucleoside, a 3′-terminal deoxy-thymine (dT) nucleoside, a 2′-O-methyl modified nucleoside (also called herein 2′-Me, where Me is a methoxy), a 2′-fluoro modified nucleoside, a 2′-deoxy-modified nucleoside, a locked nucleoside, an unlocked nucleoside, a conformationally restricted nucleoside, a constrained ethyl nucleoside, an abasic nucleoside, a 2′-amino-modified nucleoside, a 2′-0-allyl-modified nucleoside, 2′-C-alkyl-modified nucleoside, 2′-hydroxyl-modified nucleoside, a 2′-methoxyethyl modified nucleoside, a 2′-O-alkyl-modified nucleoside, a morpholino nucleoside, a phosphoramidate, a non-natural base comprising nucleoside, a tetrahydropyran modified nucleoside, a 1,5-anhydrohexitol modified nucleoside, a cyclohexenyl modified nucleoside, a nucleoside comprising a phosphorothioate group, a nucleoside comprising a methylphosphonate group, a nucleoside comprising a 5′-phosphate, and a nucleoside comprising a 5′-phosphate mimic. In another embodiment, the modified nucleosides comprise a short sequence of 3′-terminal deoxy-thymine nucleosides (dT).

[0577] Modifications on the nucleosides may preferably be selected from the group including, but not limited to, LNA, HNA, CeNA, 2′-methoxyethyl, 2′-O-alkyl, 2′-O-allyl, 2′-C-allyl, 2′-fluoro, 2′-deoxy, 2′-hydroxyl, and combinations thereof. In another embodiment, the modifications on the nucleosides are 2′-O-methyl (“2-Me”) or 2′-fluoro modifications.

[0578] One preferred modification is a modification at the 2′—OH group of the ribose sugar, optionally selected from 2′-Me or 2′-F modifications.

[0579] Preferred nucleic acid comprise one or more nucleosides on the first strand and/or the second strand which are modified, to form modified nucleosides, as follows:

[0580] A nucleic acid wherein the modification is a modification at the 2′—OH group of the ribose sugar, optionally selected from 2′-Me or 2′-F modifications.

[0581] A nucleic acid wherein the first strand comprises a 2′-F modification at any of position 2, position 6, position 14, or any combination thereof, counting from position 1 of said first strand.

[0582] A nucleic acid wherein the second strand comprises a 2′-F modification at any of position 7, position 9, position 11, or any combination thereof, counting from position 1 of said second strand.

[0583] A nucleic acid wherein the first and second strand each comprise 2′-Me and 2′-F modifications.

[0584] A nucleic which comprises at least one thermally destabilizing modification, suitably at one or more of positions 1 to 9 of the first strand counting from position 1 of the first strand, and/or at one or more of positions on the second strand aligned with positions 1 to 9 of the first strand, wherein the destabilizing modification is selected from a modified unlocked nucleic acid (UNA) and a glycol nucleic acid (GNA), preferably a glycol nucleic acid, more preferably an (S)-glycol nucleic acid.

[0585] A nucleic acid which comprises at least one thermally destabilizing modification at position 7 of the first strand, counting from position 1 of the first strand.

[0586] A nucleic acid which is an siRNA oligonucleoside, wherein the siRNA oligonucleoside comprises 3 or more 2′-F modifications at positions 6 to 12 of the second strand, such as 4, 5, 6 or 7 2′-F modifications at positions 6 to 12 of the second strand, counting from position 1 of said second strand.

[0587] A nucleic acid which is an siRNA oligonucleoside, wherein said second strand comprises at least 3, such as 4, 5 or 6, 2′-Me modifications at positions 1 to 6 of the second strand, counting from position 1 of said second strand.

[0588] A nucleic acid which is an siRNA oligonucleoside, wherein said first strand comprises at least 5 2′-Me consecutive modifications at the 3′ terminal region, preferably including the terminal nucleoside at the 3′ terminal region, or at least within 1 or 2 nucleosides from the terminal nucleoside at the 3′ terminal region.

[0589] A nucleic acid which is an siRNA oligonucleoside, wherein said first strand comprises 7 2′-Me consecutive modifications at the 3′ terminal region, preferably including the terminal nucleoside at the 3′ terminal region.

[0590] A nucleic acid which is an siRNA oligonucleoside, wherein each of the first and second strands comprises an alternating modification pattern, preferably a fully alternating modification pattern along the entire length of each of the first and second strands, wherein the nucleosides of the first strand are modified by (i) 2′Me modifications on the odd numbered nucleosides counting from position 1 of the first strand, and (ii) 2′F modifications on the even numbered nucleosides counting from position 1 of the first strand, and nucleosides of the second strand are modified by (i) 2′F modifications on the odd numbered nucleosides counting from position 1 of the second strand, and (ii) 2′Me modifications on the even numbered nucleosides counting from position 1 of the second strand. Typically such fully alternating modification patterns are present in a blunt ended oligonucleoside, wherein each of the first and second strands are 19 nucleosides in length.

[0591] Position 1 of the first or the second strand is the nucleoside which is the closest to the end of the nucleic acid (ignoring any abasic nucleosides) and that is joined to an adjacent nucleoside (at Position 2) via a 3′ to 5′ internal bond, with reference to the bonds between the sugar moieties of the backbone and reading in a direction away from that end of the molecule.

[0592] It can therefore be seen that “position 1 of the sense strand” is the 5′ most nucleoside (not including abasic nucleosides) at the conventional 5′ end of the sense strand. Typically, the nucleoside at this position 1 of the sense strand will be equivalent to the 5′ nucleoside of the selected target nucleic acid sequence, and more generally the sense strand will have equivalent nucleosides to those of the target nucleic acid sequence starting from this position 1 of the sense strand, whilst also allowing for acceptable mismatches between the sequences.

[0593] As used herein, “position 1 of the antisense strand” is the 5′ most nucleoside (not including abasic nucleosides) at the conventional 5′ end of the antisense strand. As hereinbefore described, there will be a region of complementarity between the sense and antisense strands, and in this way the antisense strand will also have a region of complementarity to the target nucleic acid sequence as referred to above.

[0594] In certain embodiments, the nucleic acid e.g. siRNA agent further comprises at least one phosphorothioate or methylphosphonate internucleoside linkage. For example the phosphorothioate or methylphosphonate internucleoside linkage can be at the 3′-terminus or in the terminal region of one strand, i.e., the sense strand or the antisense strand; or at the ends of both strands, the sense strand and the antisense strand.

[0595] In certain embodiments, the phosphorothioate or methylphosphonate internucleoside linkage is at the 5′terminus or in the terminal region of one strand, i.e., the sense strand or the antisense strand; or at the ends of both strands, the sense strand and the antisense strand.

[0596] In certain embodiments, a phosphorothioate or a methylphosphonate internucleoside linkage is at both the 5′- and 3′-terminus or in the terminal region of one strand, i.e., the sense strand or the antisense strand; or at the ends of both strands, the sense strand and the antisense strand.

[0597] Any nucleic acid may comprise one or more phosphorothioate (PS) modifications within the nucleic acid, such as at least two PS internucleoside bonds at the ends of a strand.

[0598] At least one of the oligoribonucleoside strands preferably comprises at least two consecutive phosphorothioate modifications in the last 3 nucleosides of the oligonucleoside.

[0599] The invention therefore also relates to: A nucleic acid disclosed herein which comprises phosphorothioate internucleoside linkages respectively between at least two or three consecutive positions, such as in a 5′ and/or 3′ terminal region and/or near terminal region of the second strand, whereby said near terminal region is preferably adjacent said terminal region wherein said one or more abasic nucleosides of said second strand is/are located.

[0600] A nucleic acid disclosed herein which comprises phosphorothioate internucleoside linkages respectively between at least two or three consecutive positions in a 5′ and/or 3′ terminal region of the first strand, whereby preferably the terminal position at the 5′ and/or 3′ terminal region of said first strand is attached to its adjacent position by a phosphorothioate internucleoside linkage.

[0601] The nucleic acid strand may be an RNA comprising a phosphorothioate internucleoside linkage between the three nucleosides contiguous with 2 terminally located abasic nucleosides.

[0602] A preferred nucleic acid is a double stranded RNA comprising 2 adjacent abasic nucleosides at the 5′ terminus of the second strand and a ligand moiety comprising one or more GalNAc ligand moieties at the opposite 3′ end of the second strand. Further preferred, the same nucleic acid may also comprise a phosphorothioate bond between nucleotides at positions 3-4 and 4-5 of the second strand, reading from the position 1 of the second strand. Further preferred, the same nucleic acid may also comprise a 2′ F modification at positions 7, 9 and 11 of the second strand.

[0603] Preferred modifications are as follows.

[0604] A nucleic acid wherein modified nucleosides of said second strand have a modification pattern according to any one of the following (5′-3′):

Me-Me-Me-Me-Me-Me-F-F-F-F-F-Me-Me-Me-Me-Me-Me-Me-
F-Me-Me,
or
Me-Me-Me-Me-Me-F-F-Me-F-F-F-F-Me-Me-Me-Me-Me-Me-
Me-Me-Me,
or
Me-Me-Me-Me-Me-Me-F-Me-F-F-F-F-Me-Me-Me-Me-Me-Me-
Me-Me-Me,
or
Me-Me-Me-Me-Me-Me-Me-Me-F-F-F-Me-Me-Me-Me-Me-Me-
Me-Me-Me-Me,
or
Me-Me-Me-Me-Me-Me-F-Me-F-F-F-Me-Me-Me-Me-Me-Me-
Me-Me-Me-Me.

[0605] A nucleic acid wherein modified nucleosides of said second strand have a modification pattern according to any one of the following (5′-3′):

Me(s)Me(s)Me-Me-Me-Me-F-F-F-F-F-Me-Me-Me-Me-Me-
Me-Me-F-Me-Me,
or
Me(s)Me(s)Me-Me-Me-F-F-Me-F-F-F-F-Me-Me-Me-Me-Me-
Me-Me-Me-Me,
or
Me(s)Me(s)Me-Me-Me-Me-F-Me-F-F-F-F-Me-Me-Me-Me-
Me-Me-Me-Me-Me,
or
Me(s)Me(s)Me-Me-Me-Me-Me-Me-F-F-F-Me-Me-Me-Me-
Me-Me-Me-Me-Me-Me,
or
Me(s)Me(s)Me-Me-Me-Me-F-Me-F-F-F-Me-Me-Me-Me-Me-
Me-Me-Me-Me-Me,
or
Me-Me-Me-Me-Me-Me-F-F-F-F-F-Me-Me-Me-Me-Me-Me-
Me-F-Me(s)Me(s),
or
Me-Me-Me-Me-Me-F-F-Me-F-F-F-F-Me-Me-Me-Me-Me-Me-
Me-Me(s)Me(s),
or
Me-Me-Me-Me-Me-Me-F-Me-F-F-F-F-Me-Me-Me-Me-Me-
Me-Me-Me(s)Me(s),
or
Me-Me-Me-Me-Me-Me-Me-Me-F-F-F-Me-Me-Me-Me-Me-Me-
Me-Me-Me(s)Me(s),
or
Me-Me-Me-Me-Me-Me-F-Me-F-F-F-Me-Me-Me-Me-Me-Me-
Me-Me-Me(s)Me(s),

wherein (s) is a phosphorothioate internucleoside linkage.

[0606] A nucleic acid wherein modified nucleosides of said second strand have a modification pattern according to any one of the following (5′-3′):

ia-ia-Me-Me-Me-Me-Me-Me-F-F-F-F-F-Me-Me-Me-Me-Me-
Me-Me-F-Me-Me,
or
ia-ia-Me-Me-Me-Me-Me-F-F-Me-F-F-F-F-Me-Me-Me-Me-
Me-Me-Me-Me-Me,
or
ia-ia-Me-Me-Me-Me-Me-Me-F-Me-F-F-F-F-Me-Me-Me-
Me-Me-Me-Me-Me-Me,
or
ia-ia-Me-Me-Me-Me-Me-Me-Me-Me-F-F-F-Me-Me-Me-Me-
Me-Me-Me-Me-Me-Me,
or
ia-ia-Me-Me-Me-Me-Me-Me-F-Me-F-F-F-Me-Me-Me-Me-
Me-Me-Me-Me-Me-Me,
or
Me-Me-Me-Me-Me-Me-F-F-F-F-F-Me-Me-Me-Me-Me-Me-
Me-F-Me-Me-ia-ia,
or
Me-Me-Me-Me-Me-F-F-Me-F-F-F-F-Me-Me-Me-Me-Me-Me-
Me-Me-Me-ia-ia,
or
Me-Me-Me-Me-Me-Me-F-Me-F-F-F-F-Me-Me-Me-Me-Me-Me-
Me-Me-Me-ia-ia,
or
Me-Me-Me-Me-Me-Me-Me-Me-F-F-F-Me-Me-Me-Me-Me-Me-
Me-Me-Me-Me-ia-ia,
or
Me-Me-Me-Me-Me-Me-F-Me-F-F-F-Me-Me-Me-Me-Me-Me-
Me-Me-Me-Me-ia-ia,

wherein ia represents an inverted abasic nucleoside, and when the inverted abasic nucleosides as represented by ia-ia are present at the 3′ terminus of the second strand, said inverted abasic nucleosides are present in a 2 nucleoside overhang.

[0607] A nucleic acid wherein modified nucleosides of said second strand have a modification pattern according to any one of the following (5′-3′):

ia-ia-Me(s)Me(s)Me-Me-Me-Me-F-F-F-F-F-Me-Me-Me-
Me-Me-Me-Me-F-Me-Me,
or
ia-ia-Me(s)Me(s)Me-Me-Me-F-F-Me-F-F-F-F-Me-Me-Me-
Me-Me-Me-Me-Me-Me,
or
ia-ia-Me(s)Me(s)Me-Me-Me-Me-F-Me-F-F-F-F-Me-Me-
Me-Me-Me-Me-Me-Me-Me,
or
ia-ia-Me(s)Me(s)Me-Me-Me-Me-Me-Me-F-F-F-Me-Me-
Me-Me-Me-Me-Me-Me-Me-Me,
or
ia-ia-Me(s)Me(s)Me-Me-Me-Me-F-Me-F-F-F-Me-Me-Me-
Me-Me-Me-Me-Me-Me-Me,
or
Me-Me-Me-Me-Me-Me-F-F-F-F-F-Me-Me-Me-Me-Me-Me-
Me-F-Me(s)Me(s)ia-ia,
or
Me-Me-Me-Me-Me-F-F-Me-F-F-F-F-Me-Me-Me-Me-Me-Me-
Me-Me(s)Me(s)ia-ia,
or
Me-Me-Me-Me-Me-Me-F-Me-F-F-F-F-Me-Me-Me-Me-Me-Me-
Me-Me(s)Me(s)ia-ia,
or
Me-Me-Me-Me-Me-Me-Me-Me-F-F-F-Me-Me-Me-Me-Me-Me-
Me-Me-Me(s)Me(s)ia-ia,
or
Me-Me-Me-Me-Me-Me-F-Me-F-F-F-Me-Me-Me-Me-Me-Me-
Me-Me-Me(s)Me(s)ia-ia,

[0608] wherein:
[0609] (s) is a phosphorothioate internucleoside linkage, ia represents an inverted abasic nucleoside, and when the inverted abasic nucleosides as represented by ia-ia are present at the 3′ terminus of the second strand, said inverted abasic nucleosides are present in a 2 nucleoside overhang.

[0610] A nucleic acid wherein modified nucleosides have the following modification patterns:
[0611] Modification pattern 1: Second strand (5′-3′): Me-Me-Me-Me-Me-Me-F-F-F-F-F-Me-Me-Me-Me-Me-Me-Me-F-Me-Me, First strand (5′-3′): Me-F-Me-F-Me-F-Me-F-F-Me-Me-Me-Me-F-Me-F-Me-Me-Me-Me-Me-Me-Me
[0612] Or Modification pattern 2: Second strand (5′-3′): Me-Me-Me-Me-Me-F-F-Me-F-F-F-F-Me-Me-Me-Me-Me-Me-Me-Me-Me, First strand (5′-3′): Me-F-Me-F-Me-F-Me-F-F-Me-Me-Me-Me-F-Me-F-Me-Me-Me-Me-Me-Me-Me
[0613] Or Modification pattern 3: Second strand (5′-3′): Me-Me-Me-Me-Me-Me-F-Me-F-F-F-F-Me-Me-Me-Me-Me-Me-Me-Me-Me, First strand (5′-3′): Me-F-Me-F-Me-F-Me-F-F-Me-Me-Me-Me-F-Me-F-Me-Me-Me-Me-Me-Me-Me
[0614] Or Modification pattern 4: Second strand (5′-3′): Me-Me-Me-Me-Me-Me-F-Me-F-F-F-F-Me-Me-Me-Me-Me-Me-Me-Me-Me, First strand (5′-3′): Me-F-Me-F-Me-F-Me-Me-Me-Me-Me-Me-Me-F-Me-F-Me-Me-Me-Me-Me-Me-Me
[0615] Or Modification pattern 5: Second strand (5′-3′): Me-Me-Me-Me-Me-Me-Me-Me-F-F-F-Me-Me-Me-Me-Me-Me-Me-Me-Me-Me, First strand (5′-3′): Me-F-Me-Me-Me-F-Me-Me-F-Me-Me-Me-Me-F-Me-F-Me-Me-Me-Me-Me-Me-Me
[0616] Or Modification pattern 6: Second strand (5′-3′): Me-Me-Me-Me-Me-Me-F-Me-F-F-F-Me-Me-Me-Me-Me-Me-Me-Me-Me-Me, First strand (5′-3′): Me-F-Me-Me-Me-F-Me-Me-F-Me-Me-Me-Me-F-Me-F-Me-Me-Me-Me-Me-Me-Me.

[0617] A nucleic acid wherein modified nucleosides have the following modification patterns:
[0618] Second strand (5′-3′): Me-Me-Me-Me-Me-Me-F-Me-F-F-F-F-Me-Me-Me-Me-Me-Me-Me-Me-Me, First strand (5′-3′): Me-F-Me-F-Me-F-Me-Me-Me-Me-Me-Me-Me-F-Me-F-Me-Me-Me-Me-Me-Me-Me
[0619] or
[0620] Second strand (5′-3′): Me-Me-Me-Me-Me-Me-Me-Me-F-F-F-Me-Me-Me-Me-Me-Me-Me-Me-Me-Me, First strand (5′-3′): Me-F-Me-Me-Me-F-Me-Me-F-Me-Me-Me-Me-F-Me-F-Me-Me-Me-Me-Me-Me-Me

[0621] A nucleic acid wherein modified nucleosides have the following modification patterns:
[0622] Modification pattern 1: Second strand (5′-3′): Me(s)Me(s)Me-Me-Me-Me-F-F-F-F-F-Me-Me-Me-Me-Me-Me-Me-F-Me-Me, First strand (5′-3′): Me(s)F(s)Me-F-Me-F-Me-F-F-Me-Me-Me-Me-F-Me-F-Me-Me-Me-Me-Me(s)Me(s)Me
[0623] Or Modification pattern 2: Second strand (5′-3′): Me(s)Me(s)Me-Me-Me-F-F-Me-F-F-F-F-Me-Me-Me-Me-Me-Me-Me-Me-Me, First strand (5′-3′): Me(s)F(s)Me-F-Me-F-Me-F-F-Me-Me-Me-Me-F-Me-F-Me-Me-Me-Me-Me(s)Me(s)Me
[0624] Or Modification pattern 3: Second strand (5′-3′): Me(s)Me(s)Me-Me-Me-Me-F-Me-F-F-F-F-Me-Me-Me-Me-Me-Me-Me-Me-Me, First strand (5′-3′): Me(s)F(s)Me-F-Me-F-Me-F-F-Me-Me-Me-Me-F-Me-F-Me-Me-Me-Me-Me(s)Me(s)Me
[0625] Or Modification pattern 4: Second strand (5′-3′): Me(s)Me(s)Me-Me-Me-Me-F-Me-F-F-F-F-Me-Me-Me-Me-Me-Me-Me-Me-Me, First strand (5′-3′): Me(s)F(s)Me-F-Me-F-Me-Me-Me-Me-Me-Me-Me-F-Me-F-Me-Me-Me-Me-Me(s)Me(s)Me
[0626] Or Modification pattern 5: Second strand (5′-3′): Me(s)Me(s)Me-Me-Me-Me-Me-Me F-F-F-Me-Me-Me-Me-Me-Me-Me-Me-Me-Me, First strand (5′-3′): Me(s)F(s)Me-Me-Me-F-Me-Me-F-Me-Me-Me-Me-F-Me-F-Me-Me-Me-Me-Me(s)Me(s)Me
[0627] Or Modification pattern 6: Second strand (5′-3′): Me(s)Me(s)Me-Me-Me-Me-F-Me-F-F-F-Me-Me-Me-Me-Me-Me-Me-Me-Me-Me, First strand (5′-3′): Me(s)F(s)Me-Me-Me-F-Me-Me-F-Me-Me-Me-Me-F-Me-F-Me-Me-Me-Me-Me(s)Me(s)Me
[0628] wherein (s) is a phosphorothioate internucleoside linkage.

[0629] A nucleic acid wherein modified nucleosides have the following modification patterns:
[0630] Second strand (5′-3′): Me(s)Me(s)Me-Me-Me-Me-F-Me-F-F-F-F-Me-Me-Me-Me-Me-Me-Me-Me-Me, First strand (5′-3′): Me(s)F(s)Me-F-Me-F-Me-Me-Me-Me-Me-Me-Me-F-Me-F-Me-Me-Me-Me-Me(s)Me(s)Me
[0631] or
[0632] Second strand (5′-3′): Me(s)Me(s)Me-Me-Me-Me-Me-Me-F-F-F-Me-Me-Me Me-Me-Me-Me-Me-Me-Me, First strand (5′-3′): Me(s)F(s)Me-Me-Me-F-Me Me-F-Me-Me-Me-Me-F-Me-F-Me-Me-Me-Me-Me(s)Me(s)Me
[0633] wherein (s) is a phosphorothioate internucleoside linkage.

[0634] A nucleic acid wherein modified nucleosides have the following modification patterns:
[0635] Modification pattern 1: Second strand (5′-3′): Me-Me-Me-Me-Me-Me-F-F-F-F F-Me-Me-Me-Me-Me-Me-Me-F-Me(s)Me(s), First strand (5′-3′): Me(s)F(s)Me F-Me-F-Me-F-F-Me-Me-Me-Me-F-Me-F-Me-Me-Me-Me-Me(s)Me(s)Me
[0636] Or Modification pattern 2: Second strand (5′-3′): Me-Me-Me-Me-Me-F-F-Me-F F-F-F-Me-Me-Me-Me-Me-Me-Me-Me(s)Me(s), First strand (5′-3′): Me(s)F(s)Me-F-Me-F-Me-F-F-Me-Me-Me-Me-F-Me-F-Me-Me-Me-Me-Me(s)Me(s)Me
[0637] Or Modification pattern 3: Second strand (5′-3′): Me-Me-Me-Me-Me-Me-F-Me-F-F-F-F-Me-Me-Me-Me-Me-Me-Me-Me(s)Me(s), First strand (5′-3′): Me(s)F(s)Me-F-Me-F-Me-F-F-Me-Me-Me-Me-F-Me-F-Me-Me-Me-Me-Me(s)Me(s)Me
[0638] Or Modification pattern 4: Second strand (5′-3′): Me-Me-Me-Me-Me-Me-F-Me-F-F-F-F-Me-Me-Me-Me-Me-Me-Me-Me(s)Me(s), First strand (5′-3′): Me(s)F(s)Me-F-Me-F-Me-Me-Me-Me-Me-Me-Me-F-Me-F-Me-Me-Me-Me-Me(s)Me(s)Me
[0639] Or Modification pattern 5: Second strand (5′-3′): Me-Me-Me-Me-Me-Me-Me-Me-F-F-F-Me-Me-Me-Me-Me-Me-Me-Me-Me(s)Me(s), First strand (5′-3′): Me(s)F(s)Me-Me-Me-F-Me-Me-F-Me-Me-Me-Me-F-Me-F-Me-Me-Me-Me-Me(s)Me(s)Me
[0640] Or Modification pattern 6: Second strand (5′-3′): Me-Me-Me-Me-Me-Me-F-Me-F-F-F-Me-Me-Me-Me-Me-Me-Me-Me-Me(s)Me(s), First strand (5′-3′): Me(s)F(s)Me-Me-Me-F-Me-Me-F-Me-Me-Me-Me-F-Me-F-Me-Me-Me-Me-Me(s)Me(s)Me
[0641] wherein (s) is a phosphorothioate internucleoside linkage.

[0642] A nucleic acid wherein modified nucleosides have the following modification patterns:
[0643] Modification pattern 1: Second strand (5′-3′): ia-ia-Me-Me-Me-Me-Me-Me-F-F-F-F-F-Me-Me-Me-Me-Me-Me-Me-F-Me-Me, First strand (5′-3′): Me-F-Me-F-Me-F-Me-F-F-Me-Me-Me-Me-F-Me-F-Me-Me-Me-Me-Me-Me-Me
[0644] Or Modification pattern 2: Second strand (5′-3′): ia-ia-Me-Me-Me-Me-Me-F-F-Me-F-F-F-F-Me-Me-Me-Me-Me-Me-Me-Me-Me, First strand (5′-3′): Me-F-Me-F-Me-F-Me-F-F-Me-Me-Me-Me-F-Me-F-Me-Me-Me-Me-Me-Me-Me
[0645] Or Modification pattern 3: Second strand (5′-3′): ia-ia-Me-Me-Me-Me-Me-Me-F-Me-F-F-F-F-Me-Me-Me-Me-Me-Me-Me-Me-Me, First strand (5′-3′): Me-F-Me-F-Me-F-Me-F-F-Me-Me-Me-Me-F-Me-F-Me-Me-Me-Me-Me-Me-Me
[0646] Or Modification pattern 4: Second strand (5′-3′): ia-ia-Me-Me-Me-Me-Me-Me-F-Me-F-F-F-F-Me-Me-Me-Me-Me-Me-Me-Me-Me, First strand (5′-3′): Me-F-Me-F-Me-F-Me-Me-Me-Me-Me-Me-Me-F-Me-F-Me-Me-Me-Me-Me-Me-Me
[0647] Or Modification pattern 5: Second strand (5′-3′): ia-ia-Me-Me-Me-Me-Me-Me-Me-Me-F-F-F-Me-Me-Me-Me-Me-Me-Me-Me-Me-Me, First strand (5′-3′): Me-F-Me-Me-Me-F-Me-Me-F-Me-Me-Me-Me-F-Me-F-Me-Me-Me-Me-Me-Me-Me
[0648] Or Modification pattern 6: Second strand (5′-3′): ia-ia-Me-Me-Me-Me-Me-Me-F-Me-F-F-F-Me-Me-Me-Me-Me-Me-Me-Me-Me-Me, First strand (5′-3′): Me-F-Me-Me-Me-F-Me-Me-F-Me-Me-Me-Me-F-Me-F-Me-Me-Me-Me-Me-Me-Me,
[0649] wherein ia represents an inverted abasic nucleoside.

[0650] A nucleic acid wherein modified nucleosides have the following modification patterns:
[0651] Second strand (5′-3′): ia-ia-Me-Me-Me-Me-Me-Me-F-Me-F-F-F-F-Me-Me-Me-Me-Me-Me-Me-Me-Me, First strand (5′-3′): Me-F-Me-F-Me-F-Me-Me-Me-Me-Me-Me-Me-F-Me-F-Me-Me-Me-Me-Me-Me-Me
[0652] or
[0653] Second strand (5′-3′): ia-ia-Me-Me-Me-Me-Me-Me-Me-Me-F-F-F-Me-Me-Me-Me-Me-Me-Me-Me-Me-Me, First strand (5′-3′): Me-F-Me-Me-Me-F-Me-Me-F-Me-Me-Me-Me-F-Me-F-Me-Me-Me-Me-Me-Me-Me
[0654] wherein ia represents an inverted abasic nucleoside.

[0655] A nucleic acid wherein modified nucleosides have the following modification patterns:
[0656] Modification pattern 1: Second strand (5′-3′): Me-Me-Me-Me-Me-Me-F-F-F-F-F-Me-Me-Me-Me-Me-Me-Me-F-Me-Me-ia-ia, First strand (5′-3′): Me-F-Me-F-Me-F-Me-F-F-Me-Me-Me-Me-F-Me-F-Me-Me-Me-Me-Me-Me-Me
[0657] Or Modification pattern 2: Second strand (5′-3′): Me-Me-Me-Me-Me-F-F-Me-F-F-F-F-Me-Me-Me-Me-Me-Me-Me-Me-Me-ia-ia, First strand (5′-3′): Me-F-Me-F-Me-F-Me-F-F-Me-Me-Me-Me-F-Me-F-Me-Me-Me-Me-Me-Me-Me
[0658] Or Modification pattern 3: Second strand (5′-3′): Me-Me-Me-Me-Me-Me-F-Me-F-F-F-F-Me-Me-Me-Me-Me-Me-Me-Me-Me-ia-ia, First strand (5′-3′): Me-F-Me-F-Me-F-Me-F-F-Me-Me-Me-Me-F-Me-F-Me-Me-Me-Me-Me-Me-Me
[0659] Or Modification pattern 4: Second strand (5′-3′): Me-Me-Me-Me-Me-Me-F-Me-F-F-F-F-Me-Me-Me-Me-Me-Me-Me-Me-Me-ia-ia, First strand (5′-3′): Me-F-Me-F-Me-F-Me-Me-Me-Me-Me-Me-Me-F-Me-F-Me-Me-Me-Me-Me-Me-Me
[0660] Or Modification pattern 5: Second strand (5′-3′): Me-Me-Me-Me-Me-Me-Me-Me-F-F-F-Me-Me-Me-Me-Me-Me-Me-Me-Me-Me-ia-ia, First strand (5′-3′): Me-F-Me-Me-Me-F-Me-Me-F-Me-Me-Me-Me-F-Me-F-Me-Me-Me-Me-Me-Me-Me
[0661] Or Modification pattern 6: Second strand (5′-3′): Me-Me-Me-Me-Me-Me-F-Me-F-F-F-Me-Me-Me-Me-Me-Me-Me-Me-Me-Me-ia-ia,-First strand (5′-3′): Me-F-Me-Me-Me-F-Me-Me-F-Me-Me-Me-Me-F-Me-F-Me-Me-Me-Me-Me-Me-Me,
[0662] wherein ia represents an inverted abasic nucleoside, and when the inverted abasic nucleosides as represented by ia-ia are present at the 3′ terminus of the second strand, said inverted abasic nucleosides are present in a 2 nucleoside overhang.

[0663] A nucleic acid wherein modified nucleosides have the following modification patterns:
[0664] Modification pattern 1: Second strand (5′-3′): ia-ia-Me(s)Me(s)Me-Me-Me-Me-F-F-F-F-F-Me-Me-Me-Me-Me-Me-Me-F-Me-Me, First strand (5′-3′): Me(s)F(s)Me-F-Me-F-Me-F-F-Me-Me-Me-Me-F-Me-F-Me-Me-Me-Me-Me(s)Me(s)Me
[0665] Or Modification pattern 2: Second strand (5′-3′): ia-ia-Me(s)Me(s)Me-Me-Me-F-F-Me-F-F-F-F-Me-Me-Me-Me-Me-Me-Me-Me-Me, First strand (5′-3′): Me(s)F(s)Me-F-Me-F-Me-F-F-Me-Me-Me-Me-F-Me-F-Me-Me-Me-Me-Me(s)Me(s)Me
[0666] Or Modification pattern 3: Second strand (5′-3′): ia-ia-Me(s)Me(s)Me-Me-Me-Me-F-Me-F-F-F-F-Me-Me-Me-Me-Me-Me-Me-Me-Me, First strand (5′-3′): Me(s)F(s)Me-F-Me-F-Me-F-F-Me-Me-Me-Me-F-Me-F-Me-Me-Me-Me-Me(s)Me(s)Me
[0667] Or Modification pattern 4: Second strand (5′-3′): ia-ia-Me(s)Me(s)Me-Me-Me-Me-F-Me-F-F-F-F-Me-Me-Me-Me-Me-Me-Me-Me-Me, First strand (5′-3′): Me(s)F(s)Me-F-Me-F-Me-Me-Me-Me-Me-Me-Me-F-Me-F-Me-Me-Me-Me-Me(s)Me(s)Me
[0668] Or Modification pattern 5: Second strand (5′-3′): ia-ia-Me(s)Me(s)Me-Me-Me-Me-Me-Me-F-F-F-Me-Me-Me-Me-Me-Me-Me-Me-Me-Me, First strand (5′-3′): Me(s)F(s)Me-Me-Me-F-Me-Me-F-Me-Me-Me-Me-F-Me-F-Me-Me-Me-Me-Me(s)Me(s)Me
[0669] Or Modification pattern 6: Second strand (5′-3′): ia-ia-Me(s)Me(s)Me-Me-Me-Me-F-Me-F-F-F-Me-Me-Me-Me-Me-Me-Me-Me-Me-Me, First strand (5′-3′): Me(s)F(s)Me-Me-Me-F-Me-Me-F-Me-Me-Me-Me-F-Me-F-Me-Me-Me-Me-Me(s)Me(s)Me
[0670] wherein:
[0671] (s) is a phosphorothioate internucleoside linkage, ia represents an inverted abasic nucleoside.

[0672] A nucleic acid wherein modified nucleosides have the following modification patterns:
[0673] Second strand (5′-3′): ia-ia-Me(s)Me(s)Me-Me-Me-Me-F-Me-F-F-F-F-Me-Me-Me-Me-Me-Me-Me-Me-Me, First strand (5′-3′): Me(s)F(s)Me-F-Me-F-Me-Me-Me-Me-Me-Me-Me-F-Me-F-Me-Me-Me-Me-Me(s)Me(s)Me
[0674] or
[0675] Second strand (5′-3′): ia-ia-Me(s)Me(s)Me-Me-Me-Me-Me-Me-F-F-F-Me-Me-Me-Me-Me-Me-Me-Me-Me-Me, First strand (5′-3′): Me(s)F(s)Me-Me-Me-F-Me-Me-F-Me-Me-Me-Me-F-Me-F-Me-Me-Me-Me-Me(s)Me(s)Me
[0676] wherein (s) is a phosphorothioate internucleoside linkage, ia represents an inverted abasic nucleoside.

[0677] A nucleic acid wherein modified nucleosides have the following modification patterns:
[0678] Modification pattern 1: Second strand (5′-3′): Me-Me-Me-Me-Me-Me-F-F-F-F-F-Me-Me-Me-Me-Me-Me-Me-F-Me(s)Me(s)ia-ia, First strand (5′-3′): Me(s)F(s)Me-F-Me-F-Me-F-F-Me-Me-Me-Me-F-Me-F-Me-Me-Me-Me-Me(s)Me(s)Me
[0679] Or Modification pattern 2: Second strand (5′-3′): Me-Me-Me-Me-Me-F-F-Me-F-F-F-F-Me-Me-Me-Me-Me-Me-Me-Me(s)Me(s)ia-ia, First strand (5′-3′): Me(s)F(s)Me-F-Me-F-Me-F-F-Me-Me-Me-Me-F-Me-F-Me-Me-Me-Me-Me(s)Me(s)Me
[0680] Or Modification pattern 3: Second strand (5′-3′): Me-Me-Me-Me-Me-Me-F-Me-F-F-F-F-Me-Me-Me-Me-Me-Me-Me-Me(s)Me(s)ia-ia, First strand (5′-3′): Me(s)F(s)Me-F-Me-F-Me-F-F-Me-Me-Me-Me-F-Me-F-Me-Me-Me-Me-Me(s)Me(s)Me
[0681] Or Modification pattern 4: Second strand (5′-3′): Me-Me-Me-Me-Me-Me-F-Me-F-F-F-F-Me-Me-Me-Me-Me-Me-Me-Me(s)Me(s)ia-ia, First strand (5′-3′): Me(s)F(s)Me-F-Me-F-Me-Me-Me-Me-Me-Me-Me-F-Me-F-Me-Me-Me-Me-Me(s)Me(s)Me
[0682] Or Modification pattern 5: Second strand (5′-3′): Me-Me-Me-Me-Me-Me-Me-Me-F-F-F-Me-Me-Me-Me-Me-Me-Me-Me-Me(s)Me(s)ia-ia, First strand (5′-3′): Me(s)F(s)Me-Me-Me-F-Me-Me-F-Me-Me-Me-Me-F-Me-F-Me-Me-Me-Me-Me(s)Me(s)Me
[0683] Or Modification pattern 6: Second strand (5′-3′): Me-Me-Me-Me-Me-Me-F-Me-F-F-F-Me-Me-Me-Me-Me-Me-Me-Me-Me(s)Me(s)ia-ia, First strand (5′-3′): Me(s)F(s)Me-Me-Me-F-Me-Me-F-Me-Me-Me-Me-F-Me-F-Me-Me-Me-Me-Me(s)Me(s)Me
[0684] wherein: (s) is a phosphorothioate internucleoside linkage, ia represents an inverted abasic nucleoside, and when the inverted abasic nucleosides as represented by ia-ia are present at the 3′ terminus of the second strand, said inverted abasic nucleosides are present in a 2 nucleoside overhang.

[0685] Particularly preferred is a nucleic acid wherein modified nucleosides have the following modification patterns:
[0686] Second strand (5′-3′): ia-ia-Me(s)Me(s)Me-Me-Me-Me-F-Me-F-F-F-F-Me-Me-Me-Me-Me-Me-Me-Me-Me, First strand (5′-3′): Me(s)F(s)Me-F-Me-F-Me-Me-Me-Me-Me-Me-Me-F-Me-F-Me-Me-Me-Me-Me(s)Me(s)Me
[0687] or
[0688] Second strand (5′-3′): ia-ia-Me(s)Me(s)Me-Me-Me-Me-Me-Me-F-F-F-Me-Me-Me-Me-Me-Me-Me-Me-Me-Me, First strand (5′-3′): Me(s)F(s)Me-Me-Me-F-Me-Me-F-Me-Me-Me-Me-F-Me-F-Me-Me-Me-Me-Me(s)Me(s)Me
[0689] wherein:
[0690] (s) is a phosphorothioate internucleoside linkage, ia represents an inverted abasic nucleoside.

### Conjugation

[0691] Another modification of the nucleic acid e.g. RNA e.g. an siRNA of the invention involves linking the nucleic acid e.g. the siRNA to one or more ligand moieties e.g. to enhance the activity, cellular distribution, or cellular uptake of the nucleic acid e.g. siRNA e.g. into a cell.

[0692] In some embodiments, the ligand moiety described can be attached to a nucleic acid e.g. an siRNA oligonucleoside, via a linker that can be cleavable or non-cleavable. The term “linker” or “linking group” means an organic moiety that connects two parts of a compound, e.g., covalently attaches two parts of a compound.

[0693] The ligand can be attached to the 3′ or 5′ end of the sense strand.

[0694] The ligand is preferably conjugated to 3′ end of the sense strand of the nucleic acid e.g. an siRNA agent.

[0695] The invention therefore relates in a further aspect to a conjugate for inhibiting expression of a target gene in a cell, said conjugate comprising a nucleic acid portion and one or more ligand moieties, said nucleic acid portion comprising a nucleic acid as disclosed herein.

[0696] In one aspect the second strand of the nucleic acid is conjugated directly or indirectly (e.g. via a linker) to the one or more ligand moiety(s), wherein said ligand moiety is typically present at a terminal region of the second strand, preferably at the 3′ terminal region thereof.

[0697] In certain embodiments, the ligand moiety comprises a GalNAc or GalNAc derivative attached to the nucleic acid eg dsiRNA through a linker.

[0698] Therefore the invention relates to a conjugate wherein the ligand moiety comprises
[0699] i) one or more GalNAc ligands; and/or
[0700] ii) one or more GalNAc ligand derivatives; and/or
[0701] iii) one or more GalNAc ligands conjugated to said nucleic acid through a linker.

[0702] Said GalNAc ligand may be conjugated directly or indirectly to the 5′ or 3′ terminal region of the second strand of the nucleic acid, preferably at the 3′ terminal region thereof.

[0703] GalNAc ligands are well known in the art and described in, inter alia, EP3775207A1.

[0704] In some embodiments, the GalNAc ligand is comprised in any one of the linkers shown in FIGS. 1 to 4 or FIG. 5 (Formula XI), wherein the “oligonucleotide” may be any nucleic acid disclosed herein. Accordingly, the “oligonucleotide” may comprise other bonds than a phosphodiester bond, such as one or more phosphorothioate bonds. Preferably, the nucleic acid according to the invention is a double stranded oligonucleoside as defined herein and the linker is conjugated to the second strand, more preferably to the 3′ terminal region of the second strand, via a phosphodiester bond.

[0705] In some embodiments, the GalNAc ligand is comprised in the linker shown in FIG. 3, wherein the “oligonucleotide” may be any nucleic acid disclosed herein. Accordingly, the “oligonucleotide” may comprise other bonds than a phosphodiester bond, such as one or more phosphorothioate bonds. Preferably, the nucleic acid according to the invention is a double stranded oligonucleoside as defined herein and the linker is conjugated to the second strand, more preferably to the 3′ terminal region of the second strand, via a phosphodiester bond.

[0706] In some embodiments, the GalNAc ligand is comprised in the linker shown in FIG. 5 (Formula XI), wherein the “oligonucleotide” may be any nucleic acid disclosed herein. Accordingly, the “oligonucleotide” may comprise other bonds than a phosphodiester bond, such as one or more phosphorothioate bonds. Preferably, the nucleic acid according to the invention is a double stranded oligonucleoside as defined herein and the linker is conjugated to the second strand, more preferably to the 3′ terminal region of the second strand, via a phosphodiester bond

[0707] In some embodiments, the GalNAc ligand is comprised in any one of the linkers shown in FIGS. 1 to 4 or FIG. 5 (Formula XI), wherein the “oligonucleotide” represents a nucleic acid according to the invention, wherein the nucleic acid according to the invention comprises a modified second strand having the following modification pattern (5′-3′):

ia-ia-Me(s)Me(s)Me-Me-Me-Me-F-Me-F-F-F-F-Me-Me-
Me-Me-Me-Me-Me-Me-Me
or
ia-ia-Me(s)Me(s)Me-Me-Me-Me-Me-Me-F-F-F-Me-Me-Me-
Me-Me-Me-Me-Me-Me-Me,

[0708] wherein (s) is a phosphorothioate internucleoside linkage and ia represents an inverted abasic nucleoside,
[0709] preferably wherein the linker is conjugated to the 3′ terminal region of the second strand via a phosphodiester bond.

[0710] In some embodiments, the GalNAc ligand is comprised in the linker shown in FIG. 3, wherein the “oligonucleotide” represents a nucleic acid according to the invention, wherein the nucleic acid according to the invention comprises a modified second strand having the following modification pattern (5′-3′):

ia-ia-Me(s)Me(s)Me-Me-Me-Me-F-Me-F-F-F-F-Me-Me-
Me-Me-Me-Me-Me-Me-Me
or
ia-ia-Me(s)Me(s)Me-Me-Me-Me-Me-Me-F-F-F-Me-Me-Me-
Me-Me-Me-Me-Me-Me-Me,

[0711] wherein (s) is a phosphorothioate internucleoside linkage and ia represents an inverted abasic nucleoside,
[0712] preferably wherein the linker is conjugated to the 3′ terminal region of the second strand via a phosphodiester bond.

[0713] In some embodiments, the GalNAc ligand is comprised in the linker shown in FIG. 5 (Formula XI), wherein the “oligonucleotide” represents a nucleic acid according to the invention, wherein the nucleic acid according to the invention comprises a modified second strand having the following modification pattern (5′-3′):

ia-ia-Me(s)Me(s)Me-Me-Me-Me-F-Me-F-F-F-F-Me-Me-
Me-Me-Me-Me-Me-Me-Me
or
ia-ia-Me(s)Me(s)Me-Me-Me-Me-Me-Me-F-F-F-Me-Me-Me-
Me-Me-Me-Me-Me-Me-Me,

[0714] wherein (s) is a phosphorothioate internucleoside linkage and ia represents an inverted abasic nucleoside,
[0715] preferably wherein the linker is conjugated to the 3′ terminal region of the second strand via a phosphodiester bond.

[0716] In some embodiments, the GalNAc ligand is comprised in any one of the linkers shown in FIGS. 1 to 4 or FIG. 5 (Formula XI), wherein the “oligonucleotide” represents a nucleic acid according to the invention, wherein the nucleic acid according to the invention comprises a modified second strand having the following modification pattern (5′-3′):

ia-ia-Me(s)Me(s)Me-Me-Me-Me-F-Me-F-F-F-F-Me-Me-
Me-Me-Me-Me-Me-Me-Me
or
ia-ia-Me(s)Me(s)Me-Me-Me-Me-Me-Me-F-F-F-Me-Me-Me-
Me-Me-Me-Me-Me-Me-Me,

[0717] wherein (s) is a phosphorothioate internucleoside linkage and ia represents an inverted abasic nucleoside,
[0718] and wherein the second strand has the following structure:

[chemical structure]

[0719] wherein:
[0720] T represents a 2′Me ribose modification,
[0721] B represents the nucleoside bases of the first two basic nucleosides in the 5′ terminal region of the second strand, and
[0722] Z represents the remaining 19 contiguous basic nucleosides of the second strand.

[0723] In some embodiments, the GalNAc ligand is comprised in the linker shown in FIG. 3, wherein the “oligonucleotide” represents a nucleic acid according to the invention, wherein the nucleic acid according to the invention comprises a modified second strand having the following modification pattern (5′-3′):

ia-ia-Me(s)Me(s)Me-Me-Me-Me-F-Me-F-F-F-F-Me-Me-
Me-Me-Me-Me-Me-Me-Me
or
ia-ia-Me(s)Me(s)Me-Me-Me-Me-Me-Me-F-F-F-Me-Me-Me-
Me-Me-Me-Me-Me-Me-Me,

[0724] wherein (s) is a phosphorothioate internucleoside linkage and ia represents an inverted abasic nucleoside,
[0725] and wherein the second strand has the following structure:

[chemical structure]

[0726] wherein:
[0727] T represents a 2′Me ribose modification,
[0728] B represents the nucleoside bases of the first two basic nucleosides in the 5′ terminal region of the second strand, and
[0729] Z represents the remaining 19 contiguous basic nucleosides of the second strand.

[0730] In some embodiments, the GalNAc ligand is comprised in the linker shown in FIG. 5 (Formula XI), wherein the “oligonucleotide” represents a nucleic acid according to the invention, wherein the nucleic acid according to the invention comprises a modified second strand having the following modification pattern (5′-3′):

ia-ia-Me(s)Me(s)Me-Me-Me-Me-F-Me-F-F-F-F-Me-Me-
Me-Me-Me-Me-Me-Me-Me
or
ia-ia-Me(s)Me(s)Me-Me-Me-Me-Me-Me-F-F-F-Me-Me-Me-
Me-Me-Me-Me-Me-Me-Me,

[0731] wherein (s) is a phosphorothioate internucleoside linkage and ia represents an inverted abasic nucleoside,
[0732] and wherein the second strand has the following structure:

[chemical structure]

[0733] wherein:
[0734] T represents a 2′Me ribose modification,
[0735] B represents the nucleoside bases of the first two basic nucleosides in the 5′ terminal region of the second strand, and
[0736] Z represents the remaining 19 contiguous basic nucleosides of the second strand.

### Vector And Cell

[0737] In one aspect, the invention provides a cell containing a nucleic acid, such as inhibitory RNA [RNAi] as described herein.

[0738] In one aspect, the invention provides a cell comprising a vector as described herein.

### Pharmaceutically Acceptable Compositions

[0739] In one aspect, the invention provides a pharmaceutical composition for inhibiting expression of a target gene, the composition comprising a nucleic acid as disclosed herein.

[0740] The pharmaceutically acceptable composition may comprise an excipient and or carrier.

[0741] Some examples of materials which can serve as pharmaceutically-acceptable carriers include: (1) sugars, such as lactose, glucose and sucrose; (2) starches, such as corn starch and potato starch; (3) cellulose, and its derivatives, such as sodium carboxymethyl cellulose, ethyl cellulose and cellulose acetate; (4) powdered tragacanth; (5) malt; (6) gelatin; (7) lubricating agents, such as magnesium stearate, sodium lauryl sulfate and talc; (8) excipients, such as cocoa butter and suppository waxes; (9) oils, such as peanut oil, cottonseed oil, safflower oil, sesame oil, olive oil, corn oil and soybean oil; (10) glycols, such as propylene glycol; (11) polyols, such as glycerin, sorbitol, mannitol and polyethylene glycol; (12) esters, such as ethyl oleate and ethyl laurate; (13) agar; (14) buffering agents, such as magnesium hydroxide and aluminum hydroxide; (15) alginic acid; (16) pyrogen-free water; (17) isotonic saline; (18) Ringer's solution; (19) ethyl alcohol; (20) pH buffered solutions; (21) polyesters, polycarbonates and/or poly anhydrides; (22) bulking agents, such as polypeptides and amino acids (23) serum component, such as serum albumin, HDL and LDL; and (22) other non-toxic compatible substances employed in pharmaceutical formulations.

[0742] Typical pharmaceutical carriers include, but are not limited to, binding agents (e.g., pregelatinized maize starch, polyvinylpyrrolidone or hydroxypropyl methylcellulose, etc.); fillers (e.g., lactose and other sugars, microcrystalline cellulose, pectin, gelatin, calcium sulfate, ethyl cellulose, polyacrylates or calcium hydrogen phosphate, etc.); lubricants (e.g., magnesium stearate, talc, silica, colloidal silicon dioxide, stearic acid, metallic stearates, hydrogenated vegetable oils, corn starch, polyethylene glycols, sodium benzoate, sodium acetate, etc.); disintegrants (e.g., starch, sodium starch glycolate, etc.); and wetting agents (e.g., sodium lauryl sulphate, etc).

[0743] Pharmaceutically acceptable organic or inorganic excipients suitable for non-parenteral administration which do not deleteriously react with nucleic acids can also be used to formulate the compositions of the present invention. Suitable pharmaceutically acceptable excipients include, but are not limited to, water, salt solutions, alcohols, polyethylene glycols, gelatin, lactose, amylose, magnesium stearate, talc, silicic acid, viscous paraffin, hydroxymethylcellulose, polyvinylpyrrolidone, and the like.

[0744] Formulations for topical administration of nucleic acids can include sterile and non-sterile aqueous solutions, non-aqueous solutions in common solvents such as alcohols, or solutions of the nucleic acids in liquid or solid oil bases. The solutions can also contain buffers, diluents and other suitable additives. Pharmaceutically acceptable organic or inorganic excipients suitable for non-parenteral administration which do not deleteriously react with nucleic acids can be used.

[0745] In one embodiment, the nucleic acid or composition is administered in an unbuffered solution. In certain embodiments, the unbuffered solution is saline or water. In other embodiments, the nucleic acid e.g. siRNA agent is administered in a buffered solution. In such embodiments, the buffer solution can comprise acetate, citrate, prolamine, carbonate, or phosphate, or any combination thereof. For example, the buffer solution can be phosphate buffered saline (PBS).

### Dosages

[0746] The pharmaceutical compositions of the invention may be administered in dosages sufficient to inhibit expression of a gene. In general, a suitable dose of a nucleic acid e.g. an siRNA of the invention will be in the range of about 0.001 to about 200.0 milligrams per kilogram body weight of the recipient per day, generally in the range of about 1 to 50 mg per kilogram body weight per day. Typically, a suitable dose of a nucleic acid e.g. an siRNA of the invention will be in the range of about 0.1 mg/kg to about 5.0 mg/kg, e.g., about 0.3 mg/kg and about 3.0 mg/kg.

[0747] A repeat-dose regimen may include administration of a therapeutic amount of a nucleic acid e.g. siRNA on a regular basis, such as every other day or once a year. In certain embodiments, the nucleic acid e.g. siRNA is administered about once per month to about once per quarter (i.e., about once every three months).

[0748] In various embodiments, the nucleic acid e.g. siRNA agent is administered at a dose of about 0.01 mg/kg to about 10 mg/kg or about 0.5 mg/kg to about 50 mg/kg. In some embodiments, the nucleic acid e.g. siRNA agent is administered at a dose of about 10 mg/kg to about 30 mg/kg. In certain embodiments, the nucleic acid e.g. siRNA agent is administered at a dose selected from about 0.5 mg/kg 1 mg/kg, 1.5 mg/kg, 3 mg/kg, 5 mg/kg, 10 mg/kg, and 30 mg/kg. In certain embodiments, the nucleic acid e.g. agent is administered about once per week, once per month, once every other two months, or once a quarter (i.e., once every three months) at a dose of about 0.1 mg/kg to about 5.0 mg/kg. In certain embodiments, the nucleic acid e.g. siRNA agent is administered to the subject once a week. In certain embodiments, the nucleic acid e.g. siRNA agent is administered to the subject once a month. In certain embodiments, the nucleic acid e.g. siRNA agent is administered once per quarter (i.e., every three months).

[0749] After an initial treatment regimen, the treatments can be administered on a less frequent basis. For example, after administration weekly or biweekly for three months, administration can be repeated once per month, for six months, or a year; or longer.

[0750] The pharmaceutical composition can be administered once daily, or administered as two, three, or more sub-doses at appropriate intervals throughout the day or even using continuous infusion or delivery through a controlled release formulation. In that case, the nucleic acid e.g. siRNA contained in each sub-dose must be correspondingly smaller in order to achieve the total daily dosage. The dosage unit can also be compounded for delivery over several days, e.g., using a conventional sustained release formulation which provides sustained release of the nucleic acid e.g. siRNA over a several day period. Sustained release formulations are well known in the art and are particularly useful for delivery of agents at a particular site, such as could be used with the agents of the present invention. In this embodiment, the dosage unit contains a corresponding multiple of the daily dose.

[0751] In other embodiments, a single dose of the pharmaceutical compositions can be long lasting, such that subsequent doses are administered at not more than 3, 4, or 5 day intervals, or at not more than 1, 2, 3, or 4 week intervals. In some embodiments of the invention, a single dose of the pharmaceutical compositions of the invention is administered once per week. In other embodiments of the invention, a single dose of the pharmaceutical compositions of the invention is administered bimonthly. In certain embodiments, the siRNA is administered about once per month to about once per quarter (i.e., about once every three months), or even every 6 months or 12 months.

[0752] Estimates of effective dosages and in vivo half-lives for the individual nucleic acid e.g. siRNAs encompassed by the invention can be made using conventional methodologies or on the basis of in vivo testing using an appropriate animal model, as known in the art.

[0753] The pharmaceutical compositions of the present invention can be administered in a number of ways depending upon whether local or systemic treatment is desired and upon the area to be treated. Administration can be topical {e.g., by a transdermal patch), pulmonary, e.g., by inhalation or insufflation of powders or aerosols, including by nebulizer; intratracheal, intranasal, epidermal and transdermal, oral or parenteral. Parenteral administration includes intravenous, intraarterial, subcutaneous, intraperitoneal, or intramuscular injection or infusion; subdermal, e.g., via an implanted device; or intracranial, e.g., by intraparenchymal, intrathecal or intraventricular administration. In certain preferred embodiments, the compositions are administered by intravenous infusion or injection. In certain embodiments, the compositions are administered by subcutaneous injection.

[0754] In one embodiment, the nucleic acid e.g. agent is administered to the subject subcutaneously.

[0755] The nucleic acid e.g. siRNA can be delivered in a manner to target a particular tissue {e.g. in particular liver cells).

### Methods for Inhibiting Target Gene Expression

[0756] The present invention also provides methods of inhibiting expression of a target gene in a cell. The methods include contacting a cell with a nucleic acid of the invention e.g. siRNA agent, such as double stranded siRNA agent, in an amount effective to inhibit expression of the target gene in the cell, thereby inhibiting expression of the target gene in the cell.

[0757] Contacting of a cell with the nucleic acid e.g. an siRNA, such as a double stranded siRNA agent, may be done in vitro or in vivo. Contacting a cell in vivo with nucleic acid e.g. includes contacting a cell or group of cells within a subject, e.g., a human subject, with the nucleic acid e.g. siRNA. Combinations of in vitro and in vivo methods of contacting a cell are also possible. Contacting a cell may be direct or indirect, as discussed above. Furthermore, contacting a cell may be accomplished via a targeting ligand moiety, including any ligand moiety described herein or known in the art. In preferred embodiments, the targeting ligand moiety is a carbohydrate moiety, e.g. a GalNAc3 ligand, or any other ligand moiety that directs the siRNA agent to a site of interest.

[0758] The term “inhibiting,” as used herein, is used interchangeably with “reducing,” “silencing,” “downregulating”, “suppressing”, and other similar terms, and includes any level of inhibition.

[0759] In some embodiments of the methods of the invention, expression of a target gene is inhibited by at least 30%, 35%, 40%, 45%, 50%, 55%, 60%, 65%, 70%, 75%, 80%, 85%, 90%, or 95%, or to below the level of detection of the assay, preferably when determined by qPCR as described herein and/or when the siRNA is introduced into the target cell by transfection. In certain embodiments, the methods include a clinically relevant inhibition of expression of a target gene e.g. as demonstrated by a clinically relevant outcome after treatment of a subject with an agent to reduce the expression of the gene

[0760] In some embodiments, when transfected into the cells, the nucleic acid of the invention inhibits expression of a target gene with an IC50 value lower than 2000 pM, 1900 pM, 1800 pM, 1700 pM, 1600 pM, 1500 pM, 1400 pM, 1300 pM, 1200 pM, 1100 pM, 1000 pM, 900 pM, 800 pM, 700 pM, 600 pM, 500 pM, 400 pM, 300 pM, 200 pM or 100 pM, preferably when determined by qPCR, more preferably by reverse transcriptase (RT)-qPCR, as described herein.

[0761] In a preferred embodiment, when transfected into the cells, the nucleic acid of the invention inhibits expression of a target gene with an IC50 value lower than 2000 pM. In a more preferred embodiment, when transfected into the cells, the nucleic acid of the invention inhibits expression of a target gene with an IC50 value lower than 1000 pM. In an even more preferred embodiment, when transfected into the cells, the nucleic acid of the invention inhibits expression of a target gene with an IC50 value lower than 500 pM. In a most preferred embodiment, when transfected into the cells, the nucleic acid of the invention inhibits expression of a target gene with an IC50 value lower than 100 pM.

[0762] Inhibition of a target gene may be quantified by the following method:

Huh7 cells (human hepatocyte-derived cell line, obtained from JCRB Cell Bank) may be maintained in Dulbecco's Modified Eagle Medium (DMEM) supplemented with 10% FBS at 37° C. in an atmosphere of 5% CO₂. Cells may then be transfected with siRNA duplexes targeting an mRNA transcribed from a target gene or a negative control siRNA (siRNA-control; sense strand 5′-UUCUCCGAACGUGUCACGUTT-3′ (SEQ ID NO:487), antisense strand 5′-ACGUGACACGUUCGGAGAATT-3′ (SEQ ID NO:486)) using 10×3-fold serial dilutions over a final duplex concentration range of 20 nM to 1 pM. Transfection may be carried out by adding 9.7 pL Opti-MEM (ThermoFisher) plus 0.3 pL Lipofectamine RNAiMAX (ThermoFisher) to 10 μL of each siRNA duplex. The mixture may be incubated at room temperature for 15 minutes before being added to 100 μL of complete growth medium containing 20,000 Huh7 cells. Cells may be incubated for 24 hours at 37° C./5% CO₂ prior to total RNA purification using a RNeasy 96 Kit (Qiagen). Each duplex may be tested by transfection in duplicate wells in a single experiment.
cDNA synthesis may be performed using FastQuant RT (with gDNase) Kit (Tiangen). Real-time quantitative PCR (qPCR) may be performed on an ABI Prism 7900HT or ABI QuantStudio 7 with primers specific for a target gene and human GAPDH (Hs02786624_g1) using FastStart Universal Probe Master Kit (Roche).

[0763] qPCR may be performed in duplicate on cDNA derived from each well and the mean cycle threshold (Ct) calculated. Relative target gene expression may be calculated from mean Ct values using the comparative Ct (ΔΔCt) method, normalised to GAPDH and relative to untreated cells. Maximum percent inhibition of target gene expression and IC50 values may be calculated using a four parameter (variable slope) model using GraphPad Prism 9.

[0764] Alternatively or in addition, inhibition of expression of a target gene may be characterized by a reduction of mean relative expression of the target gene.

[0765] In some embodiments, when cells are transfected with 0.1 nM of the nucleic acid of the invention, the mean relative expression of the target gene is below 1, 0.9, 0.8, 0.7, 0.6, 0.5, or 0.4, preferably when determined by qPCR, more preferably by reverse transcriptase (RT)-qPCR, as described herein.

[0766] In some embodiments, when cells are transfected with 5 nM of the nucleic acid of the invention, the mean relative expression of the target gene is below 1, 0.9, 0.8, 0.7, 0.6, 0.5, 0.4 or 0.3, preferably when determined by qPCR, more preferably by reverse transcriptase (RT)-qPCR, as described herein.

[0767] Mean relative expression of the target gene may be quantified by the following method:

Huh7 cells (human hepatocyte-derived cell line, obtained from JCRB Cell Bank) may be maintained in Dulbecco's Modified Eagle Medium (DMEM) supplemented with 10% FBS at 37° C. in at atmosphere of 5% CO₂. Cells may be transfected with siRNA duplexes targeting an mRNA or a negative control siRNA (siRNA-control; sense strand 5′-UUCUCCGAACGUGUCACGUTT-3′(SEQ ID NO:487), antisense strand 5′-ACGUGACACGUUCGGAGAATT-3′(SEQ ID NO:486)) at a final duplex concentration of 5 nM and 0.1 nM. Transfection may be carried out by adding 9.7 pL Opti-MEM (ThermoFisher) plus 0.3 pL Lipofectamine RNAiMAX (ThermoFisher) to 10 μL of each siRNA duplex. The mixture may be incubated at room temperature for 15 minutes before being added to 100 μL of complete growth medium containing 20,000 Huh7 cells. Cells may be incubated for 24 hours at 37° C./5% CO₂ prior to total RNA purification using a RNeasy 96 Kit (Qiagen). Each duplex may be tested by transfection in duplicate wells in two independent experiments.
cDNA synthesis may be performed using FastQuant RT (with gDNase) Kit (Tiangen). Real-time quantitative PCR (qPCR) may be performed on an ABI Prism 7900HT or ABI QuantStudio 7 with primers specific for the target gene and human GAPDH (Hs02786624_g1) using FastStart Universal Probe Master Kit (Roche).
qPCR may be performed in duplicate on cDNA derived from each well and the mean Ct calculated. Relative target gene expression may be calculated from mean Ct values using the comparative Ct (ΔΔCt) method, normalised to GAPDH and relative to untreated cells.

[0768] Inhibition of the expression of a target gene may be manifested by a reduction of the amount of mRNA of the target gene in comparison to a suitable control.

[0769] In other embodiments, inhibition of the expression of the target gene may be assessed in terms of a reduction of a parameter that is functionally linked to gene expression, e.g, protein expression or signaling pathways. Example target genes as illustrated herein are HCII, ZPI and B4GALT1.

Methods of Treating or Preventing Diseases Associated with Target Gene Expression

[0770] The present invention also provides methods of using nucleic acid e.g. an siRNA of the invention or a composition containing nucleic acid e.g. an siRNA of the invention to reduce or inhibit target gene expression in a cell. The methods include contacting the cell with a nucleic acid e.g. dsiRNA of the invention and maintaining the cell for a time sufficient to obtain degradation of the mRNA transcript of a target, thereby inhibiting expression of the target gene in the cell. Reduction in gene expression can be assessed by any methods known in the art.

[0771] In the methods of the invention the cell may be contacted in vitro or in vivo, i.e., the cell may be within a subject.

[0772] A cell suitable for treatment using the methods of the invention may be any cell that expresses a gene of interest associated with disease related to a disorder of haemostasis, such as a disease related to a disorder of haemostasis, such as haemophilia. Alternatively, a cell suitable for treatment using the methods of the invention may be any cell that expresses a gene of interest associated with diabetes or cardiovascular disease.

[0773] The in vivo methods of the invention may include administering to a subject a composition containing a nucleic acid of the invention e.g. an siRNA, where the nucleic acid e.g. siRNA includes a nucleoside sequence that is complementary to at least a part of an RNA transcript of a target gene of the mammal to be treated.

[0774] The present invention further provides methods of treatment of a subject in need thereof. The treatment methods of the invention include administering a nucleic acid such as an siRNA of the invention to a subject, e.g., a subject that would benefit from a reduction or inhibition of the expression of a target gene, in a therapeutically effective amount e.g. a nucleic acid such as an siRNA to a target gene or a pharmaceutical composition comprising the nucleic acid targeting a gene.

[0775] The disease to be treated can be related to a disorder of haemostasis, such as a disease related to a disorder of haemostasis, such as haemophilia, in particular when the target gene is HCII or ZPI as disclosed herein.

[0776] Haemophilia, or hemophilia is a mostly inherited genetic disorder that impairs the body's ability to make blood clots, a process needed to stop bleeding. This results in subjects bleeding for a longer time after an injury, easy bruising, and an increased risk of bleeding inside joints or the brain. Subjects with a mild case of the disease may have symptoms only after an accident or during surgery. Bleeding into a joint, also referred to as haemarthrosis, can result in permanent damage while bleeding in the brain can result in long term headaches, seizures, or a decreased level of consciousness.

[0777] There are two main types of haemophilia: haemophilia A, which occurs due to low amounts of clotting factor VIII, and haemophilia B, which occurs due to low levels of clotting factor IX. They are typically inherited from one's parents through an X chromosome carrying a nonfunctional gene. Rarely a new mutation may occur during early development or haemophilia may develop later in life due to antibodies forming against a clotting factor.

[0778] Other types include haemophilia C, which occurs due to low levels of factor XI, Von Willebrand disease, which occurs due to low levels of a substance called von Willebrand factor, and parahaemophilia, which occurs due to low levels of factor V. Haemophilia A, B, and C prevent the intrinsic pathway from functioning properly; this clotting pathway is necessary when there is damage to the endothelium of a blood vessel. Acquired haemophilia is associated with cancers, autoimmune disorders, and pregnancy. Diagnosis is by testing the blood for its ability to clot and its levels of clotting factors.

[0779] In certain embodiments, the nucleic acid of the present invention, in particular a nucleic acid inhibiting the expression of ZPI or HCII, is suitable for treatment, or for treatment of haemophilia A, B and/or C. In certain embodiments, the nucleic acid of the present invention, in particular a nucleic acid inhibiting the expression of ZPI or HCII, is suitable for treatment, or for treatment of haemophilia A and/or B. In certain embodiments, the nucleic acid of the present invention, in particular a nucleic acid inhibiting the expression of ZPI or HCII, is suitable for treatment, or for treatment of acquired haemophilia. In certain embodiments, the nucleic acid of the present invention, in particular a nucleic acid inhibiting the expression of ZPI or HCII, is suitable for treatment, or for treatment of Willebrand disease. In certain embodiments, the nucleic acid of the present invention, in particular a nucleic acid inhibiting the expression of ZPI or HCII, is suitable for treatment, or for treatment of parahaemophilia.

[0780] Without wishing to being bound by theory, treatment with the nucleic acid of the invention may result in a boost of clotting factor levels such that bleeding can be reduced or prevented. Thus, in a preferred embodiment, treatment with the nucleic acid of the invention, in particular a nucleic acid inhibiting the expression of ZPI or HCII, may reduce or prevent bleeding episodes in a subject suffering from haemophilia. In another preferred embodiment, treatment with the nucleic acid of the invention, in particular a nucleic acid inhibiting the expression of ZPI or HCII, may reduce or prevent bleeding into a joint of a subject suffering from haemophilia. In certain embodiments, treatment with the nucleic acid of the invention, in particular a nucleic acid inhibiting the expression of ZPI or HCII, may reduce or prevent bleeding into a muscle or into the brain of a subject suffering from haemophilia.

[0781] The disease to be treated can be diabetes, in particular when the target gene is B4GALT1 as disclosed herein.

[0782] According to the invention, the term “diabetes” as used herein, refers to group of metabolic diseases in which a subject has high blood sugar, either because the body does not produce enough insulin, or because cells do not respond to the insulin that is produced. There are three main types of diabetes: (1) Type 1 diabetes (T1D): results from the body's failure to produce insulin, and presently requires the person to inject insulin. (Also referred to as insulin-dependent diabetes mellitus, IDDM for short, and juvenile diabetes.) (2) Type 2 diabetes T2D): results from insulin resistance, a condition in which cells fail to use insulin properly, sometimes combined with an absolute insulin deficiency. (Formerly referred to as non-insulin-dependent diabetes mellitus, NIDDM for short, and adult-onset diabetes.) (3) Gestational diabetes (GD): is when pregnant women, who have never had diabetes before, have a high blood glucose level during pregnancy. It may precede development of T2D.

[0783] In certain embodiments, the nucleic acid according to the invention, in particular a nucleic acid inhibiting the expression of B4GALT1, or a pharmaceutical composition comprising said nucleic acid is used for the treatment of diabetes, preferably type 2 diabetes (T2D).

[0784] The disease to be treated can be a cardiovascular disease, in particular when the target gene is B4GALT1 as disclosed herein.

[0785] The term “cardiovascular disease” as used herein refers to any condition, disorder or disease state associated with, resulting from or causing a structural or functional abnormality of the heart, or of the blood vessels supplying the heart, that impairs its normal functioning.

[0786] Cardiovascular disease may comprise coronary artery disease, atherosclerosis, myocardial infarction, arteriosclerosis, hypertension, angina, deep vein thrombosis, stroke, congestive heart failure or arrhythmia. In a preferred embodiment, the cardiovascular disease is coronary artery disease.

[0787] In certain embodiments, the nucleic acid according to the invention, in particular a nucleic acid inhibiting the expression of B4GALT1, or a pharmaceutical composition comprising said nucleic acid is used for the treatment of cardiovascular disease, preferably coronary artery disease.

[0788] An nucleic acid e.g. siRNA of the invention may be administered as a “free” nucleic acid or “free siRNA, administered in the absence of a pharmaceutical composition. The naked nucleic acid may be in a suitable buffer solution. The buffer solution may comprise acetate, citrate, prolamine, carbonate, or phosphate, or any combination thereof. In one embodiment, the buffer solution is phosphate buffered saline (PBS). The pH and osmolarity of the buffer solution can be adjusted such that it is suitable for administering to a subject.

[0789] Alternatively, a nucleic acid e.g. siRNA of the invention may be administered as a pharmaceutical composition, such as a dsiRNA liposomal formulation.

[0790] In one embodiment, the method includes administering a composition featured herein such that expression of a target gene is decreased, such as for about 1, 2, 3, 4, 5, 6, 7, 8, 12, 16, 18, 24 hours, 28, 32, or about 36 hours. In one embodiment, expression of target gene is decreased for an extended duration, e.g., at least about two, three, four days or more, e.g., about one week, two weeks, three weeks, or four weeks or longer, e.g., about 1 month, 2 months, or 3 months.

[0791] Subjects can be administered a therapeutic amount of nucleic acid e.g. siRNA, such as about 0.01 mg/kg to about 200 mg/kg, so as to treat disease related to a disorder of haemostasis, such as a disease related to a disorder of haemostasis, such as haemophilia or to treat diabetes or to treat cardiovascular disease.

[0792] The nucleic acid e.g. siRNA can be administered by intravenous infusion over a period of time, on a regular basis. In certain embodiments, after an initial treatment regimen, the treatments can be administered on a less frequent basis. Administration of the siRNA can reduce gene product levels of target gene, e.g., in a cell or tissue of the patient by at least about 20%, 25%, 30%, 35%, 40%, 45%, 50%, 55%, 60%, 65%, 70%, 75%, 80%, 85%, 90%, or 95%, or below the level of detection of the assay method used. In certain embodiments, administration results in clinical stabilization or preferably clinically relevant reduction of at least one sign or symptom of a target gene-associated disorder.

[0793] Alternatively, the nucleic acid e.g. siRNA can be administered subcutaneously, i.e., by subcutaneous injection. One or more injections may be used to deliver the desired daily dose of nucleic acid e.g. siRNA to a subject. The injections may be repeated over a period of time. The administration may be repeated on a regular basis. In certain embodiments, after an initial treatment regimen, the treatments can be administered on a less frequent basis. A repeat-dose regimen may include administration of a therapeutic amount of nucleic acid on a regular basis, such as every other day or to once a year. In certain embodiments, the nucleic acid is administered about once per month to about once per quarter (i.e., about once every three months).

[0794] In one aspect, the nucleic acid disclosed herein may be a nucleic acid as defined hereinafter in Sentences 1 to 45:
[0795] 1. A nucleic acid for inhibiting expression of a target gene, comprising a duplex region that comprises:
   [0796] a first strand that is at least partially complementary to a portion of RNA transcribed from the target gene, and a second strand that is at least partially complementary to the first strand,
   [0797] wherein nucleosides of said second strand comprise a 2′ sugar modification pattern as follows (5′-3′):

Me-Me-Me-Me-Me-Me-F-F-F-F-F-Me-Me-Me-Me-Me-Me-Me-
F-Me-Me,
or
Me-Me-Me-Me-Me-F-F-Me-F-F-F-F-Me-Me-Me-Me-Me-Me-
Me-Me-Me,
or
Me-Me-Me-Me-Me-Me-F-Me-F-F-F-F-Me-Me-Me-Me-Me-Me-
Me-Me-Me.

[0798] 2. A nucleic acid for inhibiting expression of a target gene, comprising a duplex region that comprises:
   [0799] a first strand that is at least partially complementary to a portion of RNA transcribed from the target gene, and a second strand that is at least partially complementary to the first strand,
   [0800] wherein nucleosides of said second strand comprise a 2′ sugar and bond modification pattern as follows (5′-3′):

Me(s)Me(s)Me-Me-Me-Me-F-F-F-F-F-Me-Me-Me-Me-Me-Me-
Me-F-Me-Me,
or
Me(s)Me(s)Me-Me-Me-F-F-Me-F-F-F-F-Me-Me-Me-Me-Me-
Me-Me-Me-Me,
or
Me(s)Me(s)Me-Me-Me-Me-F-Me-F-F-F-F-Me-Me-Me-Me-Me-
Me-Me-Me-Me,
or
Me(s)Me(s)Me-Me-Me-Me-Me-Me-F-F-F-Me-Me-Me-Me-Me-
Me-Me-Me-Me-Me,
or
Me-Me-Me-Me-Me-Me-F-F-F-F-F-Me-Me-Me-Me-Me-Me-Me-
F(s)Me(s)Me,
or
Me-Me-Me-Me-Me-F-F-Me-F-F-F-F-Me-Me-Me-Me-Me-Me-
Me(s)Me(s)Me,
or
Me-Me-Me-Me-Me-Me-F-Me-F-F-F-F-Me-Me-Me-Me-Me-Me-
Me(s)Me(s)Me,
or
Me-Me-Me-Me-Me-Me-Me-Me-F-F-F-Me-Me-Me-Me-Me-Me-
Me-Me(s)Me(s)Me

[0801] wherein (s) is a phosphorothioate internucleoside linkage.
[0802] 3. A nucleic acid for inhibiting expression of a target gene, comprising a duplex region that comprises:
   [0803] a first strand that is at least partially complementary to a portion of RNA transcribed from the target gene, and a second strand that is at least partially complementary to the first strand,
   [0804] wherein nucleosides of said second strand comprise a 2′ sugar and abasic modification pattern as follows (5′-3′):

ia-ia-Me-Me-Me-Me-Me-Me-F-F-F-F-F-Me-Me-Me-Me-Me-
Me-Me-F-Me-Me,
or
ia-ia-Me-Me-Me-Me-Me-F-F-Me-F-F-F-F-Me-Me-Me-Me-Me-
Me-Me-Me-Me,
or
ia-ia-Me-Me-Me-Me-Me-Me-F-Me-F-F-F-F-Me-Me-Me-Me-
Me-Me-Me-Me-Me,
or
ia-ia-Me-Me-Me-Me-Me-Me-Me-Me-F-F-F-Me-Me-Me-Me-Me-
Me-Me-Me-Me-Me,
or
Me-Me-Me-Me-Me-Me-F-F-F-F-F-Me-Me-Me-Me-Me-Me-Me-
F-Me-Me-ia-ia,
or
Me-Me-Me-Me-Me-F-F-Me-F-F-F-F-Me-Me-Me-Me-Me-Me-
Me-Me-Me-ia-ia,
or
Me-Me-Me-Me-Me-Me-F-Me-F-F-F-F-Me-Me-Me-Me-Me-Me-
Me-Me-Me-ia-ia,
or
Me-Me-Me-Me-Me-Me-Me-Me-F-F-F-Me-Me-Me-Me-Me-Me-
Me-Me-Me-Me-ia-ia,

[0805] wherein ia represents an inverted abasic nucleoside, and when the inverted abasic nucleosides as represented by ia-ia are present at the 3′ terminus of the second strand, said inverted abasic nucleosides are typically present in a 2 nucleoside overhang.
[0806] 4. A nucleic acid for inhibiting expression of a target gene, comprising a duplex region that comprises:
   [0807] a first strand that is at least partially complementary to a portion of RNA transcribed from the target gene, and a second strand that is at least partially complementary to the first strand,
   [0808] wherein nucleosides of said second strand comprise a 2′ sugar, abasic and bond modification pattern as follows (5′-3′):

ia-ia-Me(s)Me(s)Me-Me-Me-Me-F-F-F-F-F-Me-Me-Me-Me-
Me-Me-Me-F-Me-Me,
or
ia-ia-Me(s)Me(s)Me-Me-Me-F-F-Me-F-F-F-F-Me-Me-Me-
Me-Me-Me-Me-Me-Me,
or
ia-ia-Me(s)Me(s)Me-Me-Me-Me-F-Me-F-F-F-F-Me-Me-Me-
Me-Me-Me-Me-Me-Me,
or
ia-ia-Me(s)Me(s)Me-Me-Me-Me-Me-Me-F-F-F-Me-Me-Me-
Me-Me-Me-Me-Me-Me-Me,
Me-Me-Me-Me-Me-Me-F-F-F-F-F-Me-Me-Me-Me-Me-Me-Me-
F(s)Me(s)Me-ia-ia,
or
Me-Me-Me-Me-Me-F-F-Me-F-F-F-F-Me-Me-Me-Me-Me-Me-
Me(s)Me(s)Me-ia-ia,
or
Me-Me-Me-Me-Me-Me-F-Me-F-F-F-F-Me-Me-Me-Me-Me-Me-
Me(s)Me(s)Me-ia-ia,
or
Me-Me-Me-Me-Me-Me-Me-Me-F-F-F-Me-Me-Me-Me-Me-Me-
Me-Me(s)Me(s)Me-ia-ia,

[0809] wherein:
[0810] (s) is a phosphorothioate internucleoside linkage,
[0811] ia represents an inverted abasic nucleoside, and when the inverted abasic nucleosides as represented by ia-ia are present at the 3′ terminus of the second strand, said inverted abasic nucleosides are typically present in a 2 nucleoside overhang.
[0812] 5. A nucleic acid according to any preceding sentence, wherein the first strand comprises a modification pattern selected from the following, or any combination thereof, wherein position 1 is the 5′ terminal nucleoside of the first strand and the direction of counting is 5′-3′:
   [0813] 2′-F sugar modifications at least at positions 2, 14 and 16, and/or
   [0814] 2′-Me sugar modifications at positions 17 to 23, or said first strand comprises at least eight 2′-F sugar modifications, such as 2′-F sugar modifications at least at positions 2, 4, 6, 12, 14, 16, 18 and 20, and/or
   [0815] 2′-Me sugar modifications at positions 1, 3 to 5, 10 to 13, or said first strand comprises at least eight 2′-F sugar modifications, such as 2′-F sugar modifications at least at positions 2, 4, 6, 12, 14, 16, 18 and 20, and/or
   [0816] a 2′-Me sugar modification at position 7 or a thermally destabilising modification, such as typically a modified unlocked nucleic acid or a glycol nucleic acid, at position 7, and/or
   [0817] a 2′-F sugar modification or a thermally destabilising modification, such as typically a modified unlocked nucleic acid or a glycol nucleic acid, at position 6, and/or
   [0818] positions 8 and 9 can be a modification selected from a 2′-Me sugar modification and a 2′-F sugar modification, and typically can be the same 2′ sugar modification,
   [0819] whereby typically the first strand can comprise the following modification pattern (5′-3′):

Me-F-Me-Me-Me-(M)₄-Me-Me-Me-Me-F-Me-F-Me-Me-Me-
Me-Me-Me-Me

[0820] where M represents a modification selected from a 2′-Me sugar modification, a 2′-F sugar modification and a thermally destabilising modification, such as typically a modified unlocked nucleic acid or a glycol nucleic acid, that may typically be present at
[0821] position 6, and it may typically be that a 2′-Me sugar modification is present at position 7,
[0822] or whereby typically the first strand comprises the following modification pattern (5′-3′):

Me-F-Me-Me-Me-(M1)-(M2)₃-Me-Me-Me-Me-F-Me-F-Me-
Me-Me-Me-Me-Me-Me

[0823] where M1 represents a thermally destabilising modification, such as typically a modified unlocked nucleic acid or a glycol nucleic acid, M2 represents a modification selected from a 2′-Me sugar modification and a 2′-F sugar modification,
[0824] or whereby typically the first strand comprises the following modification pattern (5′-3′):

Me-F-Me-Me-Me-(M1)-Me-(M2)₂-Me-Me-Me-Me-F-Me-F-
Me-Me-Me-Me-Me-Me-Me

[0825] where M1 represents a modification selected from a 2′-Me sugar modification, a 2′-F sugar modification and a thermally destabilising modification, such as typically a modified unlocked nucleic acid or a glycol nucleic acid, and M2 represents a modification selected from a 2′-Me sugar modification and a 2′-F sugar modification,
[0826] or whereby typically the first strand comprises the following modification pattern (5′-3′):

Me-F-Me-Me-Me-(M1)-Me-(M2)₂-Me-Me-Me-Me-F-Me-F-
Me-Me-Me-Me-Me-Me-Me

[0827] where M1 represents a thermally destabilising modification, such as typically a modified unlocked nucleic acid or a glycol nucleic acid, and M2 represents a modification selected from a 2′-Me sugar modification and a 2′-F sugar modification, and typically M2 can be the same 2′ sugar modification.
[0828] 6. A nucleic acid for inhibiting expression of a target gene, comprising a duplex region that comprises:
   [0829] a first strand that is at least partially complementary to a portion of RNA transcribed from the target gene, and a second strand that is at least partially complementary to the first strand,
   [0830] wherein nucleosides of said second strand comprise a 2′ sugar and abasic modification pattern as follows:
   [0831] Second strand (5′-3′): ia-ia-Me-Me-Me-Me-Me-Me-Me-Me-F-F-F-Me-Me-Me-Me-Me-Me-Me-Me-Me-Me
   [0832] or
   [0833] position 7 on the second strand includes a sugar modification that is a 2′-Me modification, wherein position 1 is the 5′ terminal nucleoside of the second strand and the direction of counting is 5′-3′, and there are typically present two inverted abasic nucleosides at 5′ terminal region of the second strand, and
   [0834] the first strand modification pattern comprises a modification pattern selected from the following, or any combination thereof, wherein position 1 is the 5′ terminal nucleoside of the first strand and the direction of counting is 5′-3′:
   [0835] 2′-F sugar modifications at least at positions 2, 14 and 16, and/or
   [0836] 2′-Me sugar modifications at positions 17 to 23, and/or
   [0837] 2′-Me sugar modifications at positions 1, 3 to 5, 10 to 13, and/or
   [0838] a 2′-Me sugar modification at position 7 or a thermally destabilising modification, such as typically a modified unlocked nucleic acid or a glycol nucleic acid, at position 7, and/or
   [0839] a 2′-F sugar modification or a thermally destabilising modification, such as typically a modified unlocked nucleic acid or a glycol nucleic acid, at position 6, and/or
   [0840] positions 8 and 9 can be a modification selected from a 2′-Me sugar modification and a 2′-F sugar modification, and typically can be the same 2′ sugar modification,
   [0841] whereby typically the first strand can comprise the following modification pattern (5′-3′):

Me-F-Me-Me-Me-(M)₄-Me-Me-Me-Me-F-Me-F-Me-Me-Me-
Me-Me-Me-Me

[0842] where M represents a modification selected from a 2′-Me sugar modification, a 2′-F sugar modification and a thermally destabilising modification, such as typically a modified unlocked nucleic acid or a glycol nucleic acid, that may typically be present at position 6, and it may typically be that a 2′-Me sugar modification is present at position 7,
[0843] or whereby typically the first strand comprises the following modification pattern (5′-3′):

Me-F-Me-Me-Me-(M1)-(M2)₃-Me-Me-Me-Me-F-Me-F-Me-
Me-Me-Me-Me-Me-Me

[0844] where M1 represents a thermally destabilising modification, such as typically a modified unlocked nucleic acid or a glycol nucleic acid, M2 represents a modification selected from a 2′-Me sugar modification and a 2′-F sugar modification,
[0845] or whereby typically the first strand comprises the following modification pattern (5′-3′):

Me-F-Me-Me-Me-(M1)-Me-(M2)₂-Me-Me-Me-Me-F-Me-F-
Me-Me-Me-Me-Me-Me-Me

[0846] where M1 represents a modification selected from a 2′-Me sugar modification, a 2′-F sugar modification and a thermally destabilising modification, such as typically a modified unlocked nucleic acid or a glycol nucleic acid, and M2 represents a modification selected from a 2′-Me sugar modification and a 2′-F sugar modification,
[0847] or whereby typically the first strand comprises the following modification pattern (5′-3′):

Me-F-Me-Me-Me-(M1)-Me-(M2)₂-Me-Me-Me-Me-F-Me-F-
Me-Me-Me-Me-Me-Me-Me

[0848] where M1 represents a thermally destabilising modification, such as typically a modified unlocked nucleic acid or a glycol nucleic acid, and M2 represents a modification selected from a 2′-Me sugar modification and a 2′-F sugar modification, and typically M2 can be the same 2′ sugar modification.
[0849] 7. A nucleic acid according to sentence 5 or 6, wherein (M)₄ represents any one of the following 2′ sugar modification patterns (5′-3′):

F-Me-Me-F
Me-F-Me-F
F-Me-F-Me
F-F-F-F
Me-F-F-Me
Me-Me-F-F
F-F-Me-Me
Me-Me-Me-Me

[0850] 8. A nucleic acid according to any of sentences 5 to 7, wherein two phosphorothioate internucleoside linkages are respectively present between three consecutive positions in both 5′ and 3′ terminal regions of the first strand, whereby a terminal nucleoside respectively at each of the 5′ and 3′ terminal regions of said first strand is each attached to a respective 5′ and 3′ adjacent penultimate nucleoside by a phosphorothioate internucleoside linkage, and each 5′ and 3′ penultimate nucleoside is attached to a
   [0851] respective 5′ and 3′ adjacent antepenultimate nucleoside by a phosphorothioate internucleoside linkage, and
   [0852] where appropriate there may further be present two phosphorothioate internucleoside linkages between three consecutive positions in the 3′ terminal region of the second strand, whereby the 3′ terminal nucleoside is attached to an adjacent penultimate nucleoside by a phosphorothioate internucleoside linkage, and said penultimate nucleoside is attached to an adjacent antepenultimate nucleoside by a phosphorothioate internucleoside linkage, and/or
   [0853] where appropriate there may further be present two phosphorothioate internucleoside linkages between three consecutive positions in the 5′ terminal region of the second strand, whereby the 5′ terminal nucleoside is attached to an adjacent penultimate nucleoside by a phosphorothioate internucleoside linkage, and said penultimate nucleoside is attached to an adjacent antepenultimate nucleoside by a phosphorothioate internucleoside linkage.
[0854] 9. A nucleic acid for inhibiting expression of a target gene, comprising a duplex region that comprises:
   [0855] a first strand that is at least partially complementary to a portion of RNA transcribed from the target gene, and a second strand that is at least partially complementary to the first strand,
   [0856] wherein nucleosides of said second and first strands comprise a 2′ sugar modification pattern as follows (5′-3′):
   [0857] Modification pattern 1:
   [0858] Second strand (5′-3′): Me-Me-Me-Me-Me-Me-F-F-F-F-F-Me-Me-Me-Me-Me-Me-Me-F-Me-Me,
   [0859] First strand (5′-3′): Me-F-Me-F-Me-F-Me-F-F-Me-Me-Me-Me-F-Me-F-Me-Me-Me-Me-Me-Me-Me
   [0860] Or Modification pattern 2:
   [0861] Second strand (5′-3′): Me-Me-Me-Me-Me-F-F-Me-F-F-F-F-Me-Me-Me-Me-Me-Me-Me-Me-Me,
   [0862] First strand (5′-3′): Me-F-Me-F-Me-F-Me-F-F-Me-Me-Me-Me-F-Me-F-Me-Me-Me-Me-Me-Me-Me
   [0863] Or Modification pattern 3:
   [0864] Second strand (5′-3′): Me-Me-Me-Me-Me-Me-F-Me-F-F-F-F-Me-Me-Me-Me-Me-Me-Me-Me-Me,
   [0865] First strand (5′-3′): Me-F-Me-F-Me-F-Me-F-F-Me-Me-Me-Me-F-Me-F-Me-Me-Me-Me-Me-Me-Me
   [0866] Or Modification pattern 4:
   [0867] Second strand (5′-3′): Me-Me-Me-Me-Me-Me-F-Me-F-F-F-F-Me-Me-Me-Me-Me-Me-Me-Me-Me,
   [0868] First strand (5′-3′): Me-F-Me-F-Me-F-Me-Me-Me-Me-Me-Me-Me-F-Me-F-Me-Me-Me-Me-Me-Me-Me
   [0869] Or Modification pattern 5:
   [0870] Second strand (5′-3′): Me-Me-Me-Me-Me-Me-Me-Me-F-F-F-Me-Me-Me-Me-Me-Me-Me-Me-Me-Me,
   [0871] First strand (5′-3′): Me-F-Me-Me-Me-F-Me-Me-F-Me-Me-Me-Me-F-Me-F-Me-Me-Me-Me-Me-Me-Me
[0872] 10. A nucleic acid for inhibiting expression of a target gene, comprising a duplex region that comprises:
   [0873] a first strand that is at least partially complementary to a portion of RNA transcribed from the target gene, and a second strand that is at least partially complementary to the first strand,
   [0874] wherein nucleosides of said second and first strands comprise a 2′ sugar and bond modification pattern as follows (5′-3′):
   [0875] Modification pattern 1:
   [0876] Second strand (5′-3′): Me(s)Me(s)Me-Me-Me-Me-F-F-F-F-F-Me-Me-Me-Me-Me-Me-Me-F-Me-Me,
   [0877] First strand (5′-3′): Me(s)F(s)Me-F-Me-F-Me-F-F-Me-Me-Me-Me-F-Me F-Me-Me-Me-Me-Me(s)Me(s)Me
   [0878] Or Modification pattern 2:
   [0879] Second strand (5′-3′): Me(s)Me(s)Me-Me-Me-F-F-Me-F-F-F-F-Me-Me-Me-Me-Me-Me-Me-Me-Me,
   [0880] First strand (5′-3′): Me(s)F(s)Me-F-Me-F-Me-F-F-Me-Me-Me-Me-F-Me F-Me-Me-Me-Me-Me(s)Me(s)Me
   [0881] Or Modification pattern 3:
   [0882] Second strand (5′-3′): Me(s)Me(s)Me-Me-Me-Me-F-Me-F-F-F-F-Me-Me-Me-Me-Me-Me-Me-Me-Me,
   [0883] First strand (5′-3′): Me(s)F(s)Me-F-Me-F-Me-F-F-Me-Me-Me-Me-F-Me F-Me-Me-Me-Me-Me(s)Me(s)Me
   [0884] Or Modification pattern 4:
   [0885] Second strand (5′-3′): Me(s)Me(s)Me-Me-Me-Me-F-Me-F-F-F-F-Me-Me-Me-Me-Me-Me-Me-Me-Me,
   [0886] First strand (5′-3′): Me(s)F(s)Me-F-Me-F-Me-Me-Me-Me-Me-Me-Me-F-Me-F-Me-Me-Me-Me-Me(s)Me(s)Me
   [0887] Or Modification pattern 5:
   [0888] Second strand (5′-3′): Me(s)Me(s)Me-Me-Me-Me-Me-Me-F-F-F-Me-Me-Me-Me-Me-Me-Me-Me-Me-Me,
   [0889] First strand (5′-3′): Me(s)F(s)Me-Me-Me-F-Me-Me-F-Me-Me-Me-Me-F-Me-F-Me-Me-Me-Me-Me(s)Me(s)Me
   [0890] Or Modification pattern 6:
   [0891] Second strand (5′-3′): Me(s)Me(s)Me-Me-Me-Me-F-Me-F-F-F-Me-Me-Me-Me-Me-Me-Me-Me-Me-Me,
   [0892] First strand (5′-3′): Me(s)F(s)Me-Me-Me-F-Me-Me-F-Me-Me-Me-Me-F-Me-F-Me-Me-Me-Me-Me(s)Me(s)Me
   [0893] wherein (s) is a phosphorothioate internucleoside linkage.
[0894] 11. A nucleic acid for inhibiting expression of a target gene, comprising a duplex region that comprises:
   [0895] a first strand that is at least partially complementary to a portion of RNA transcribed from the target gene, and a second strand that is at least partially complementary to the first strand,
   [0896] wherein nucleosides of said second and first strands comprise a 2′ sugar and bond modification pattern as follows (5′-3′):
   [0897] Modification pattern 1:
   [0898] Second strand (5′-3′): Me-Me-Me-Me-Me-Me-F-F-F-F-F-Me-Me-Me-Me-Me-Me-Me-F(s)Me(s)Me,
   [0899] First strand (5′-3′): Me(s)F(s)Me-F-Me-F-Me-F-F-Me-Me-Me-Me-F-Me F-Me-Me-Me-Me-Me(s)Me(s)Me
   [0900] Or Modification pattern 2:
   [0901] Second strand (5′-3′): Me-Me-Me-Me-Me-F-F-Me-F-F-F-F-Me-Me-Me-Me-Me-Me-Me(s)Me(s)Me,
   [0902] First strand (5′-3′): Me(s)F(s)Me-F-Me-F-Me-F-F-Me-Me-Me-Me-F-Me F-Me-Me-Me-Me-Me(s)Me(s)Me
   [0903] Or Modification pattern 3:
   [0904] Second strand (5′-3′): Me-Me-Me-Me-Me-Me-F-Me-F-F-F-F-Me-Me-Me-Me-Me-Me-Me(s)Me(s)Me,
   [0905] First strand (5′-3′): Me(s)F(s)Me-F-Me-F-Me-F-F-Me-Me-Me-Me-F-Me F-Me-Me-Me-Me-Me(s)Me(s)Me
   [0906] Or Modification pattern 4:
   [0907] Second strand (5′-3′): Me-Me-Me-Me-Me-Me-F-Me-F-F-F-F-Me-Me-Me-Me-Me-Me-Me(s)Me(s)Me,
   [0908] First strand (5′-3′): Me(s)F(s)Me-F-Me-F-Me-Me-Me-Me-Me-Me-Me-F-Me-F-Me-Me-Me-Me-Me(s)Me(s)Me
   [0909] Or Modification pattern 5:
   [0910] Second strand (5′-3′): Me-Me-Me-Me-Me-Me-Me-Me-F-F-F-Me-Me-Me-Me-Me-Me-Me-Me(s)Me(s)Me,
   [0911] First strand (5′-3′): Me(s)F(s)Me-Me-Me-F-Me-Me-F-Me-Me-Me-Me-F-Me-F-Me-Me-Me-Me-Me(s)Me(s)Me
   [0912] Or Modification pattern 6:
   [0913] Second strand (5′-3′): Me-Me-Me-Me-Me-Me-F-Me-F-F-F-Me-Me-Me Me-Me-Me-Me-Me(s)Me(s)Me,
   [0914] First strand (5′-3′): Me(s)F(s)Me-Me-Me-F-Me-Me-F-Me-Me-Me-Me-F-Me-F-Me-Me-Me-Me-Me(s)Me(s)Me
   [0915] wherein (s) is a phosphorothioate internucleoside linkage.
[0916] 12. A nucleic acid for inhibiting expression of a target gene, comprising a duplex region that comprises:
   [0917] a first strand that is at least partially complementary to a portion of RNA transcribed from the target gene, and a second strand that is at least partially complementary to the first strand,
   [0918] wherein nucleosides of said second and first strands comprise a 2′ sugar and abasic modification pattern as follows (5′-3′):
   [0919] Modification pattern 1:
   [0920] Second strand (5′-3′): ia-ia-Me-Me-Me-Me-Me-Me-F-F-F-F-F-Me-Me-Me-Me-Me-Me-Me-F-Me-Me,
   [0921] First strand (5′-3′): Me-F-Me-F-Me-F-Me-F-F-Me-Me-Me-Me-F-Me-F-Me-Me-Me-Me-Me-Me-Me
   [0922] Or Modification pattern 2:
   [0923] Second strand (5′-3′): ia-ia-Me-Me-Me-Me-Me-F-F-Me-F-F-F-F-Me-Me-Me-Me-Me-Me-Me-Me-Me,
   [0924] First strand (5′-3′): Me-F-Me-F-Me-F-Me-F-F-Me-Me-Me-Me-F-Me-F-Me-Me-Me-Me-Me-Me-Me
   [0925] Or Modification pattern 3:
   [0926] Second strand (5′-3′): ia-ia-Me-Me-Me-Me-Me-Me-F-Me-F-F-F-F-Me Me-Me-Me-Me-Me-Me-Me-Me,
   [0927] First strand (5′-3′): Me-F-Me-F-Me-F-Me-F-F-Me-Me-Me-Me-F-Me-F-Me-Me-Me-Me-Me-Me-Me
   [0928] Or Modification pattern 4:
   [0929] Second strand (5′-3′): ia-ia-Me-Me-Me-Me-Me-Me-F-Me-F-F-F-F-Me-Me-Me-Me-Me-Me-Me-Me-Me,
   [0930] First strand (5′-3′): Me-F-Me-F-Me-F-Me-Me-Me-Me-Me-Me-Me-F-Me-F-Me-Me-Me-Me-Me-Me-Me
   [0931] Or Modification pattern 5:
   [0932] Second strand (5′-3′): ia-ia-Me-Me-Me-Me-Me-Me-Me-Me-F-F-F-Me Me-Me-Me-Me-Me-Me-Me-Me-Me,
   [0933] First strand (5′-3′): Me-F-Me-Me-Me-F-Me-Me-F-Me-Me-Me-Me-F-Me-F-Me-Me-Me-Me-Me-Me-Me
   [0934] Or Modification pattern 6:
   [0935] Second strand (5′-3′): ia-ia-Me-Me-Me-Me-Me-Me-F-Me-F-F-F-Me-Me-Me-Me-Me-Me-Me-Me-Me-Me
   [0936] First strand (5′-3′): Me-F-Me-Me-Me-F-Me-Me-F-Me-Me-Me-Me-F-Me-F-Me-Me-Me-Me-Me-Me-Me
   [0937] wherein ia represents an inverted abasic nucleoside.
[0938] 13. A nucleic acid for inhibiting expression of a target gene, comprising a duplex region that comprises:
   [0939] a first strand that is at least partially complementary to a portion of RNA transcribed from the target gene, and a second strand that is at least partially complementary to the first strand,
   [0940] wherein nucleosides of said second and first strands comprise a 2′ sugar and abasic modification pattern as follows:
   [0941] Modification pattern 1:
   [0942] Second strand (5′-3′): Me-Me-Me-Me-Me-Me-F-F-F-F-F-Me-Me-Me-Me-Me-Me-Me-F-Me-Me-ia-ia,
   [0943] First strand (5′-3′): Me-F-Me-F-Me-F-Me-F-F-Me-Me-Me-Me-F-Me-F-Me-Me-Me-Me-Me-Me-Me
   [0944] Or Modification pattern 2:
   [0945] Second strand (5′-3′): Me-Me-Me-Me-Me-F-F-Me-F-F-F-F-Me-Me-Me-Me-Me-Me-Me-Me-Me-ia-ia,
   [0946] First strand (5′-3′): Me-F-Me-F-Me-F-Me-F-F-Me-Me-Me-Me-F-Me-F-Me-Me-Me-Me-Me-Me-Me
   [0947] Or Modification pattern 3:
   [0948] Second strand (5′-3′): Me-Me-Me-Me-Me-Me-F-Me-F-F-F-F-Me-Me-Me-Me-Me-Me-Me-Me-Me-ia-ia,
   [0949] First strand (5′-3′): Me-F-Me-F-Me-F-Me-F-F-Me-Me-Me-Me-F-Me-F-Me-Me-Me-Me-Me-Me-Me
   [0950] Or Modification pattern 4:
   [0951] Second strand (5′-3′): Me-Me-Me-Me-Me-Me-F-Me-F-F-F-F-Me-Me-Me-Me-Me-Me-Me-Me-Me-ia-ia,
   [0952] First strand (5′-3′): Me-F-Me-F-Me-F-Me-Me-Me-Me-Me-Me-Me-F-Me-F-Me-Me-Me-Me-Me-Me-Me
   [0953] Or Modification pattern 5:
   [0954] Second strand (5′-3′): Me-Me-Me-Me-Me-Me-Me-Me-F-F-F-Me-Me-Me-Me-Me-Me-Me-Me-Me-Me-ia-ia,
   [0955] First strand (5′-3′): Me-F-Me-Me-Me-F-Me-Me-F-Me-Me-Me-Me-F-Me-F-Me-Me-Me-Me-Me-Me-Me
   [0956] Or Modification pattern 6:
   [0957] Second strand (5′-3′): Me-Me-Me-Me-Me-Me-F-Me-F-F-F-Me-Me-Me Me-Me-Me-Me-Me-Me-Me-ia-ia
   [0958] First strand (5′-3′): Me-F-Me-Me-Me-F-Me-Me-F-Me-Me-Me-Me-F-Me-F-Me-Me-Me-Me-Me-Me-Me,
   [0959] wherein ia represents an inverted abasic nucleoside, and when the inverted abasic nucleosides as represented by ia-ia are present at the 3′ terminus of the second strand, said inverted abasic nucleosides are typically present in a 2 nucleoside overhang.
[0960] 14. A nucleic acid for inhibiting expression of a target gene, comprising a duplex region that comprises:
   [0961] a first strand that is at least partially complementary to a portion of RNA transcribed from the target gene, and a second strand that is at least partially complementary to the first strand,
   [0962] wherein nucleosides of said second and first strands comprise a 2′ sugar, abasic and bond modification pattern as follows (5′-3′):
   [0963] Modification pattern 1:
   [0964] Second strand (5′-3′): ia-ia-Me(s)Me(s)Me-Me-Me-Me-F-F-F-F-F-Me-Me-Me-Me-Me-Me-Me-F-Me-Me,
   [0965] First strand (5′-3′): Me(s)F(s)Me-F-Me-F-Me-F-F-Me-Me-Me-Me-F-Me F-Me-Me-Me-Me-Me(s)Me(s)Me
   [0966] Or Modification pattern 2:
   [0967] Second strand (5′-3′): ia-ia-Me(s)Me(s)Me-Me-Me-F-F-Me-F-F-F-F-Me Me-Me-Me-Me-Me-Me-Me-Me,
   [0968] First strand (5′-3′): Me(s)F(s)Me-F-Me-F-Me-F-F-Me-Me-Me-Me-F-Me F-Me-Me-Me-Me-Me(s)Me(s)Me
   [0969] Or Modification pattern 3:
   [0970] Second strand (5′-3′): ia-ia-Me(s)Me(s)Me-Me-Me-Me-F-Me-F-F-F-F-Me-Me-Me-Me-Me-Me-Me-Me-Me,
   [0971] First strand (5′-3′): Me(s)F(s)Me-F-Me-F-Me-F-F-Me-Me-Me-Me-F-Me F-Me-Me-Me-Me-Me(s)Me(s)Me
   [0972] Or Modification pattern 4:
   [0973] Second strand (5′-3′): ia-ia-Me(s)Me(s)Me-Me-Me-Me-F-Me-F-F-F-F-Me-Me-Me-Me-Me-Me-Me-Me-Me,
   [0974] First strand (5′-3′): Me(s)F(s)Me-F-Me-F-Me-Me-Me-Me-Me-Me-Me-F-Me-F-Me-Me-Me-Me-Me(s)Me(s)Me
   [0975] Or Modification pattern 5:
   [0976] Second strand (5′-3′): ia-ia-Me(s)Me(s)Me-Me-Me-Me-Me-Me-F-F-F-Me Me-Me-Me-Me-Me-Me-Me-Me-Me,
   [0977] First strand (5′-3′): Me(s)F(s)Me-Me-Me-F-Me-Me-F-Me-Me-Me-Me-F-Me-F-Me-Me-Me-Me-Me(s)Me(s)Me
   [0978] Or Modification pattern 6:
   [0979] Second strand (5′-3′): ia-ia-Me(s)Me(s)Me-Me-Me-Me-F-Me-F-F-F-Me-Me-Me-Me-Me-Me-Me-Me-Me-Me,
   [0980] First strand (5′-3′): Me(s)F(s)Me-Me-Me-F-Me-Me-F-Me-Me-Me-Me-F-Me-F-Me-Me-Me-Me-Me(s)Me(s)Me
   [0981] wherein:
   [0982] (s) is a phosphorothioate internucleoside linkage,
   [0983] ia represents an inverted abasic nucleoside.
[0984] 15. A nucleic acid for inhibiting expression of a target gene, comprising a duplex region that comprises:
   [0985] a first strand that is at least partially complementary to a portion of RNA transcribed from the target gene, and a second strand that is at least partially complementary to the first strand,
   [0986] wherein nucleosides of said second and first strands comprise a 2′ sugar, abasic and bond modification pattern as follows (5′-3′):
   [0987] Modification pattern 1:
   [0988] Second strand (5′-3′): Me-Me-Me-Me-Me-Me-F-F-F-F-F-Me-Me-Me-Me-Me-Me-Me-F(s)Me(s)Me-ia-ia,
   [0989] First strand (5′-3′): Me(s)F(s)Me-F-Me-F-Me-F-F-Me-Me-Me-Me-F-Me F-Me-Me-Me-Me-Me(s)Me(s)Me
   [0990] Or Modification pattern 2:
   [0991] Second strand (5′-3′): Me-Me-Me-Me-Me-F-F-Me-F-F-F-F-Me-Me-Me-Me-Me-Me-Me(s)Me(s)Me-ia-ia,
   [0992] First strand (5′-3′): Me(s)F(s)Me-F-Me-F-Me-F-F-Me-Me-Me-Me-F-Me F-Me-Me-Me-Me-Me(s)Me(s)Me
   [0993] Or Modification pattern 3:
   [0994] Second strand (5′-3′): Me-Me-Me-Me-Me-Me-F-Me-F-F-F-F-Me-Me-Me-Me-Me-Me-Me(s)Me(s)Me-ia-ia,
   [0995] First strand (5′-3′): Me(s)F(s)Me-F-Me-F-Me-F-F-Me-Me-Me-Me-F-Me F-Me-Me-Me-Me-Me(s)Me(s)Me
   [0996] Or Modification pattern 4:
   [0997] Second strand (5′-3′): Me-Me-Me-Me-Me-Me-F-Me-F-F-F-F-Me-Me-Me-Me-Me-Me-Me(s)Me(s)Me-ia-ia,
   [0998] First strand (5′-3′): Me(s)F(s)Me-F-Me-F-Me-Me-Me-Me-Me-Me-Me-F-Me-F-Me-Me-Me-Me-Me(s)Me(s)Me
   [0999] Or Modification pattern 5:
   [1000] Second strand (5′-3′): Me-Me-Me-Me-Me-Me-Me-Me-F-F-F-Me-Me-Me-Me-Me-Me-Me-Me(s)Me(s)Me-ia-ia,
   [1001] First strand (5′-3′): Me(s)F(s)Me-Me-Me-F-Me-Me-F-Me-Me-Me-Me-F-Me-F-Me-Me-Me-Me-Me(s)Me(s)Me
   [1002] Or Modification pattern 6:
   [1003] Second strand (5′-3′): Me-Me-Me-Me-Me-Me-F-Me-F-F-F-Me-Me-Me Me-Me-Me-Me-Me(s)Me(s)Me-ia-ia,
   [1004] First strand (5′-3′): Me(s)F(s)Me-Me-Me-F-Me-Me-F-Me-Me-Me-Me-F-Me-F-Me-Me-Me-Me-Me(s)Me(s)Me
   [1005] wherein:
   [1006] (s) is a phosphorothioate internucleoside linkage,
   [1007] ia represents an inverted abasic nucleoside, and when the inverted abasic nucleosides as represented by ia-ia are present at the 3′ terminus of the second strand, said inverted abasic nucleosides are typically present in a 2 nucleoside overhang.
[1008] 16. A nucleic acid for inhibiting expression of a target gene, comprising a duplex region that comprises:
   [1009] a first strand that is at least partially complementary to a portion of RNA transcribed from the target gene, and a second strand that is at least partially complementary to the first strand, wherein the second strand comprises:
   [1010] counting from the 5′ terminus position 1 of the second strand, which is the 5′ most nucleoside not including abasic nucleosides, position 7 on the second strand includes a sugar modification that is a 2′-Me modification, or
   [1011] said second strand comprises the following modification pattern:
   [1012] Second strand (5′-3′): Me-Me-Me-Me-Me-Me-Me-Me-F-F-F-Me-Me-Me-Me-Me-Me-Me-Me-Me-Me
   [1013] and wherein the first strand comprises a modification pattern selected from the following, or any combination thereof, wherein position 1 is the 5′ terminal nucleoside of the first strand and the direction of counting is 5′-3′:
   [1014] 2′-F sugar modifications at least at positions 2, 14 and 16, and/or
   [1015] 2′-Me sugar modifications at positions 17 to 23, and/or
   [1016] 2′-Me sugar modifications at positions 1, 3 to 5, 10 to 13, and/or
   [1017] a 2′-Me sugar modification at position 7 or a thermally destabilising modification, such as typically a modified unlocked nucleic acid or a glycol nucleic acid, at position 7, and/or
   [1018] a 2′-F sugar modification or a thermally destabilising modification, such as typically a modified unlocked nucleic acid or a glycol nucleic acid, at position 6, and/or
   [1019] positions 8 and 9 can be a modification selected from a 2′-Me sugar modification and a 2′-F sugar modification, and typically can be the same 2′ sugar modification,
   [1020] whereby typically the first strand can comprise the following modification pattern (5′-3′):

Me-F-Me-Me-Me-(M)₄-Me-Me-Me-Me-F-Me-F-Me-Me-
Me-Me-Me-Me-Me

[1021] where M represents a modification selected from a 2′-Me sugar modification, a 2′-F sugar modification and a thermally destabilising modification, such as typically a modified unlocked nucleic acid or a glycol nucleic acid, that may typically be present at position 6, and it may typically be that a 2′-Me sugar modification is present at position 7,
[1022] or whereby typically the first strand comprises the following modification pattern (5′-3′):

Me-F-Me-Me-Me-(M1)-(M2)₃-Me-Me-Me-Me-F-Me-F-
Me-Me-Me-Me-Me-Me-Me

[1023] where M1 represents a thermally destabilising modification, such as typically a modified unlocked nucleic acid or a glycol nucleic acid, M2 represents a modification selected from a 2′-Me sugar modification and a 2′-F sugar modification,
[1024] or whereby typically the first strand comprises the following modification pattern (5′-3′):

Me-F-Me-Me-Me-(M1)-Me-(M2)₂-Me-Me-Me-Me-F-
Me-F-Me-Me-Me-Me-Me-Me-Me

[1025] where M1 represents a modification selected from a 2′-Me sugar modification, a 2′-F sugar modification and a thermally destabilising modification, such as typically a modified unlocked nucleic acid or a glycol nucleic acid, and M2 represents a modification selected from a 2′-Me sugar modification and a 2′-F sugar modification,
[1026] or whereby typically the first strand comprises the following modification pattern (5′-3′):

Me-F-Me-Me-Me-(M1)-Me-(M2)₂-Me-Me-Me-Me-F-
Me-F-Me-Me-Me-Me-Me-Me-Me

[1027] where M1 represents a thermally destabilising modification, such as typically a modified unlocked nucleic acid or a glycol nucleic acid, and M2 represents a modification selected from a 2′-Me sugar modification and a 2′-F sugar modification, and typically M2 can be the same 2′ sugar modification.
[1028] 17. A nucleic acid for inhibiting expression of a target gene, comprising a duplex region that comprises:
   [1029] a first strand that is at least partially complementary to a portion of RNA transcribed from the target gene, and a second strand that is at least partially complementary to the first strand, wherein the second strand comprises:
   [1030] 2 consecutive abasic nucleosides in the 5′ or 3′ terminal region of the second strand, and
   [1031] counting from the 5′ terminus position 1 of the second strand, which is the 5′ most nucleoside not including abasic nucleosides, position 7 on the second strand includes a sugar modification that is a 2′-Me modification,
   [1032] and optionally wherein the first strand comprises a modification pattern selected from the following, or any combination thereof, wherein position 1 is the 5′ terminal nucleoside of the first strand and the direction of counting is 5′-3′:
   [1033] 2′-F sugar modifications at least at positions 2, 14 and 16, and/or
   [1034] 2′-Me sugar modifications at positions 17 to 23, and/or
   [1035] 2′-Me sugar modifications at positions 1, 3 to 5, 10 to 13, and/or
   [1036] a 2′-Me sugar modification at position 7 or a thermally destabilising modification, such as typically a modified unlocked nucleic acid or a glycol nucleic acid, at position 7, and/or
   [1037] a 2′-F sugar modification or a thermally destabilising modification, such as typically a modified unlocked nucleic acid or a glycol nucleic acid, at position 6, and/or
   [1038] positions 8 and 9 can be a modification selected from a 2′-Me sugar modification and a 2′-F sugar modification, and typically can be the same 2′ sugar modification,
   [1039] whereby typically the first strand can comprise the following modification pattern (5′-3′):

Me-F-Me-Me-Me-(M)₄-Me-Me-Me-Me-F-Me-F-Me-
Me-Me-Me-Me-Me-Me

[1040] where M represents a modification selected from a 2′-Me sugar modification, a 2′-F sugar modification and a thermally destabilising modification, such as typically a modified unlocked nucleic acid or a glycol nucleic acid, that may typically be present at position 6, and it may typically be that a 2′-Me sugar modification is present at position 7,
[1041] or whereby typically the first strand comprises the following modification pattern (5′-3′):

Me-F-Me-Me-Me-(M1)-(M2)₃-Me-Me-Me-Me-F-Me-F-Me-
Me-Me-Me-Me-Me-Me

[1042] where M1 represents a thermally destabilising modification, such as typically a modified unlocked nucleic acid or a glycol nucleic acid, M2 represents a modification selected from a 2′-Me sugar modification and a 2′-F sugar modification,
[1043] or whereby typically the first strand comprises the following modification pattern (5′-3′):

Me-F-Me-Me-Me-(M1)-Me-(M2)₂-Me-Me-Me-Me-F-Me-F-
Me-Me-Me-Me-Me-Me-Me

[1044] where M1 represents a modification selected from a 2′-Me sugar modification, a 2′-F sugar modification and a thermally destabilising modification, such as typically a modified unlocked nucleic acid or a glycol nucleic acid, and M2 represents a modification selected from a 2′-Me sugar modification and a 2′-F sugar modification,
[1045] or whereby typically the first strand comprises the following modification pattern (5′-3′):

Me-F-Me-Me-Me-(M1)-Me-(M2)₂-Me-Me-Me-Me-F-Me-F-
Me-Me-Me-Me-Me-Me-Me

[1046] where M1 represents a thermally destabilising modification, such as typically a modified unlocked nucleic acid or a glycol nucleic acid, and M2 represents a modification selected-230, DNA from a 2′-Me sugar modification and a 2′-F sugar modification, and typically M2 can be the same 2′ sugar modification.
[1047] 18. A nucleic acid for inhibiting expression of a target gene, comprising a duplex region that comprises:
   [1048] a first strand that is at least partially complementary to a portion of RNA transcribed from the target gene, and a second strand that is at least partially complementary to the first strand, wherein the second strand comprises:
   [1049] wherein two phosphorothioate internucleoside linkages are present between three consecutive positions in either the 5′ or 3′ terminal region of the second strand, whereby
   [1050] a terminal nucleoside respectively at either the 5′ or 3′ terminal region of said second strand is each attached to a respective 5′ or 3′ adjacent penultimate nucleoside by a phosphorothioate internucleoside linkage, and each 5′ or 3′ penultimate nucleoside is attached to a respective 5′ or 3′ adjacent antepenultimate nucleoside by a phosphorothioate internucleoside linkage,
   [1051] and
   [1052] counting from the 5′ terminus position 1 of the second strand, which is the 5′ most nucleoside not including abasic nucleosides, position 7 on the second strand includes a sugar modification that is a 2′-Me modification,
   [1053] and optionally wherein the first strand comprises a modification pattern selected from the following, or any combination thereof, wherein position 1 is the 5′ terminal nucleoside of the first strand and the direction of counting is 5′-3′:
   [1054] 2′-F sugar modifications at least at positions 2, 14 and 16, and/or
   [1055] 2′-Me sugar modifications at positions 17 to 23, and/or
   [1056] 2′-Me sugar modifications at positions 1, 3 to 5, 10 to 13, and/or
   [1057] a 2′-Me sugar modification at position 7 or a thermally destabilising modification, such as typically a modified unlocked nucleic acid or a glycol nucleic acid, at position 7, and/or
   [1058] a 2′-F sugar modification or a thermally destabilising modification, such as typically a modified unlocked nucleic acid or a glycol nucleic acid, at position 6, and/or
   [1059] positions 8 and 9 can be a modification selected from a 2′-Me sugar modification and a 2′-F sugar modification, and typically can be the same 2′ sugar modification,
   [1060] whereby typically the first strand can comprise the following modification pattern (5′-3′):

Me-F-Me-Me-Me-(M)₄-Me-Me-Me-Me-F-Me-F-Me-Me-Me-
Me-Me-Me-Me

[1061] where M represents a modification selected from a 2′-Me sugar modification, a 2′-F sugar modification and a thermally destabilising modification, such as typically a modified unlocked nucleic acid or a glycol nucleic acid, that may typically be present at position 6, and it may typically be that a 2′-Me sugar modification is present at position 7,
[1062] or whereby typically the first strand comprises the following modification pattern (5′-3′):

Me-F-Me-Me-Me-(M1)-(M2)₃-Me-Me-Me-Me-F-Me-F-Me-
Me-Me-Me-Me-Me-Me

[1063] where M1 represents a thermally destabilising modification, such as typically a modified unlocked nucleic acid or a glycol nucleic acid, M2 represents a modification selected from a 2′-Me sugar modification and a 2′-F sugar modification,
[1064] or whereby typically the first strand comprises the following modification pattern (5′-3′):

Me-F-Me-Me-Me-(M1)-Me-(M2)₂-Me-Me-Me-Me-F-Me-F-
Me-Me-Me-Me-Me-Me-Me

[1065] where M1 represents a modification selected from a 2′-Me sugar modification, a 2′-F sugar modification and a thermally destabilising modification, such as typically a modified unlocked nucleic acid or a glycol nucleic acid, and M2 represents a modification selected from a 2′-Me sugar modification and a 2′-F sugar modification,
[1066] or whereby typically the first strand comprises the following modification pattern (5′-3′):

Me-F-Me-Me-Me-(M1)-Me-(M2)₂-Me-Me-Me-Me-F-Me-F-
Me-Me-Me-Me-Me-Me-Me

[1067] where M1 represents a thermally destabilising modification, such as typically a modified unlocked nucleic acid or a glycol nucleic acid, and M2 represents a modification selected from a 2′-Me sugar modification and a 2′-F sugar modification, and typically M2 can be the same 2′ sugar modification.
[1068] 19. A nucleic acid for inhibiting expression of a target gene, comprising a duplex region that comprises:
   [1069] a first strand that is at least partially complementary to a portion of RNA transcribed from the target gene, and a second strand that is at least partially complementary to the first strand, wherein the second strand comprises:
   [1070] counting from the 5′ terminus position 1 of the second strand, which is the 5′ most nucleoside not including abasic nucleosides, position 7 on the second strand includes a sugar modification that is a 2′-Me modification, and
   [1071] at the 3′ terminus of the second strand the nucleic acid is conjugated directly or indirectly to one or more ligand moieties, wherein the ligand moiety typically comprises:
      [1072] (i) one or more N-acetyl galactosamine (GalNAc) ligands, and/or
      [1073] (ii) one or more N-acetyl galactosamine (GalNAc) ligand derivatives, and/or
      [1074] (iii) one or more N-acetyl galactosamine (GalNAc) ligands and/or derivatives thereof,
         [1075] conjugated to the nucleic acid through a linker,
   [1076] and optionally wherein the first strand comprises a modification pattern selected from the following, or any combination thereof, wherein position 1 is the 5′ terminal nucleoside of the first strand and the direction of counting is 5′-3′:
   [1077] 2′-F sugar modifications at least at positions 2, 14 and 16, and/or
   [1078] 2′-Me sugar modifications at positions 17 to 23, and/or
   [1079] 2′-Me sugar modifications at positions 1, 3 to 5, 10 to 13, and/or
   [1080] a 2′-Me sugar modification at position 7 or a thermally destabilising modification, such as typically a modified unlocked nucleic acid or a glycol nucleic acid, at position 7, and/or
   [1081] a 2′-F sugar modification or a thermally destabilising modification, such as typically a modified unlocked nucleic acid or a glycol nucleic acid, at position 6, and/or
   [1082] positions 8 and 9 can be a modification selected from a 2′-Me sugar modification and a 2′-F sugar modification, and typically can be the same 2′ sugar modification,
   [1083] whereby typically the first strand can comprise the following modification pattern (5′-3′):

Me-F-Me-Me-Me-(M)₄-Me-Me-Me-Me-F-Me-F-Me-Me-Me-
Me-Me-Me-Me

[1084] where M represents a modification selected from a 2′-Me sugar modification, a 2′-F sugar modification and a thermally destabilising modification, such as typically a modified unlocked nucleic acid or a glycol nucleic acid, that may typically be present at position 6, and it may typically be that a 2′-Me sugar modification is present at position 7,
[1085] or whereby typically the first strand comprises the following modification pattern (5′-3′):

Me-F-Me-Me-Me-(M1)-(M2)₃-Me-Me-Me-Me-F-Me-F-Me-
Me-Me-Me-Me-Me-Me

[1086] where M1 represents a thermally destabilising modification, such as typically a modified unlocked nucleic acid or a glycol nucleic acid, M2 represents a modification selected from a 2′-Me sugar modification and a 2′-F sugar modification,
[1087] or whereby typically the first strand comprises the following modification pattern (5′-3′):

Me-F-Me-Me-Me-(M1)-Me-(M2)₂-Me-Me-Me-Me-F-Me-F-
Me-Me-Me-Me-Me-Me-Me

[1088] where M1 represents a modification selected from a 2′-Me sugar modification, a 2′-F sugar modification and a thermally destabilising modification, such as typically a modified unlocked nucleic acid or a glycol nucleic acid, and M2 represents a modification selected from a 2′-Me sugar modification and a 2′-F sugar modification,
[1089] or whereby typically the first strand comprises the following modification pattern (5′-3′):

Me-F-Me-Me-Me-(M1)-Me-(M2)₂-Me-Me-Me-Me-F-Me-F-
Me-Me-Me-Me-Me-Me-Me

[1090] where M1 represents a thermally destabilising modification, such as typically a modified unlocked nucleic acid or a glycol nucleic acid, and M2 represents a modification selected from a 2′-Me sugar modification and a 2′-F sugar modification, and typically M2 can be the same 2′ sugar modification.
[1091] 20. A nucleic acid for inhibiting expression of a target gene, comprising a duplex region that comprises:
   [1092] a first strand that is at least partially complementary to a portion of RNA transcribed from the target gene, and a second strand that is at least partially complementary to the first strand, wherein said second strand comprises the following 2′ sugar and abasic modification pattern:
   [1093] Second strand (5′-3′): ia-ia-Me-Me-Me-Me-Me-Me-Me-Me-F-F-F-Me-Me-Me-Me-Me-Me-Me-Me-Me-Me
   [1094] and the first strand comprises a modification pattern selected from the following (5′-3′), wherein position 1 is the 5′ terminal nucleoside of the first strand and the direction of counting is 5′-3′:

(5′-3′)Me-F-Me-Me-Me-(M)₄-Me-Me-Me-Me-F-Me-F-Me-
Me-Me-Me-Me-Me-Me

[1095] where M represents a modification selected from a 2′-Me sugar modification, a 2′-F sugar modification and a thermally destabilising modification, such as typically a modified unlocked nucleic acid or a glycol nucleic acid, that may typically be present at position 6, and it may typically be that a 2′-Me sugar modification is present at position 7,
[1096] or whereby typically the first strand comprises the following modification pattern (5′-3′):

(5′-3')Me-F-Me-Me-Me-(M1)-(M2)₃-Me-Me-Me-Me-F-Me-
F-Me-Me-Me-Me-Me-Me-Me

[1097] where M1 represents a thermally destabilising modification, such as typically a modified unlocked nucleic acid or a glycol nucleic acid, M2 represents a modification selected from a 2′-Me sugar modification and a 2′-F sugar modification,
[1098] or whereby typically the first strand comprises the following modification pattern (5′-3′):

(5′-3′)Me-F-Me-Me-Me-(M1)-Me-(M2)₂-Me-Me-Me-Me-F-
Me-F-Me-Me-Me-Me-Me-Me-Me

[1099] where M1 represents a modification selected from a 2′-Me sugar modification, a 2′-F sugar modification and a thermally destabilising modification, such as typically a modified unlocked nucleic acid or a glycol nucleic acid, and M2 represents a modification selected from a 2′-Me sugar modification and a 2′-F sugar modification,
[1100] or whereby typically the first strand comprises the following modification pattern (5′-3′):

(5′-3′)Me-F-Me-Me-Me-(M1)-Me-(M2)₂-Me-Me-Me-Me-F-
Me-F-Me-Me-Me-Me-Me-Me-Me

[1101] where M1 represents a thermally destabilising modification, such as typically a modified unlocked nucleic acid or a glycol nucleic acid, and M2 represents a modification selected from a 2′-Me sugar modification and a 2′-F sugar modification, and typically M2 can be the same 2′ sugar modification.
[1102] 21. A nucleic acid for inhibiting expression of a target gene, comprising a duplex region that comprises:
   [1103] a first strand that is at least partially complementary to a portion of RNA transcribed from the target gene, and a second strand that is at least partially complementary to the first strand, wherein said second and first strands comprise the following modification patterns:
   [1104] Second strand (5′-3′): ia-ia-Me-Me-Me-Me-Me-Me-Me-Me-F-F-F-Me-Me-Me-Me-Me-Me-Me-Me-Me-Me
   [1105] First strand (5′-3′) Me-F-Me-Me-Me-(M1)-Me-(M2)₂-Me-Me-Me-Me F-Me-F-Me-Me-Me-Me-Me-Me-Me
   [1106] where M1 represents a thermally destabilising modification, such as typically a modified unlocked nucleic acid or a glycol nucleic acid, and M2 represents a modification selected from a 2′-Me sugar modification and a 2′-F sugar modification, and typically M2 can be the same 2′ sugar modification.
[1107] 22. A nucleic acid for inhibiting expression of a target gene, comprising a duplex region that comprises:
   [1108] a first strand that is at least partially complementary to a portion of RNA transcribed from the target gene, and a second strand that is at least partially complementary to the first strand, wherein said second strand comprises the following 2′ sugar and abasic modification pattern:
   [1109] Modification pattern 1:
   [1110] Second strand (5′-3′): ia-ia-F-Me-F-Me-F-Me-F-Me-F-Me-F-Me-F-Me-F-Me-F-Me-F-Me-F, optionally in combination with
   [1111] First strand (5′-3′): Me-F-Me-F-Me-F-Me-F-Me-F-Me-F-Me-F-Me-F-Me-F-Me-F-Me-F-Me,
   [1112] Or Modification pattern 2:
   [1113] Second strand (5′-3′): F-Me-F-Me-F-Me-F-Me-F-Me-F-Me-F-Me-F-Me-F-Me-F-Me-F-ia-ia, optionally in combination with
   [1114] First strand (5′-3′): Me-F-Me-F-Me-F-Me-F-Me-F-Me-F-Me-F-Me-F-Me-F-Me-F-Me-F-Me
   [1115] wherein:
   [1116] ia represents an inverted abasic nucleoside, and when the inverted abasic nucleosides as represented by ia-ia are present at the 3′ terminus of the second strand, said inverted abasic nucleosides are typically present in a 2 nucleoside overhang.
[1117] 23. A nucleic acid for inhibiting expression of a target gene, comprising a duplex region that comprises:
   [1118] a first strand that is at least partially complementary to a portion of RNA transcribed from the target gene, and a second strand that is at least partially complementary to the first strand, wherein said second strand comprises the following 2′ sugar, abasic and bond modification pattern:
   [1119] Modification pattern 1:
   [1120] Second strand (5′-3′): ia-ia-F(s)Me(s) F-Me-F-Me-F-Me-F-Me-F-Me-F-Me-F-Me-F-Me-F-Me-F, optionally in combination with
   [1121] First strand (5′-3′): Me(s)F(s)Me-F-Me-F-Me-F-Me-F-Me-F-Me-F-Me-F-Me-F-Me-F-Me(s)F(s)Me,
   [1122] Or Modification pattern 2:
   [1123] Second strand (5′-3′): F-Me-F-Me-F-Me-F-Me-F-Me-F-Me-F-Me-F-Me-F-Me-F(s)Me(s)F-ia-ia, optionally in combination with
   [1124] First strand (5′-3′): Me(s)F(s)Me-F-Me-F-Me-F-Me-F-Me-F-Me-F-Me-F-Me-F-Me-F-Me(s)F(s)Me
   [1125] wherein:
   [1126] (s) is a phosphorothioate internucleoside linkage,
   [1127] ia represents an inverted abasic nucleoside, and when the inverted abasic nucleosides as represented by ia-ia are present at the 3′ terminus of the second strand, said inverted abasic nucleosides are typically present in a 2 nucleoside overhang.
[1128] 24. A nucleic acid for inhibiting expression of a target gene, comprising a duplex region that comprises:
   [1129] a first strand that is at least partially complementary to a portion of RNA transcribed from the target gene, and a second strand that is at least partially complementary to the first strand,
   [1130] wherein nucleosides of said second and first strands comprise a 2′ sugar and bond modification pattern as follows (5′-3′):
   [1131] Second strand (5′-3′): Me-Me-Me-Me-Me-Me-F-Me-F-F-F-Me-Me-Me Me-Me-Me-Me-Me-Me-Me, or
   [1132] wherein the 2′-Me or 2′-F modified nucleosides of said first strand include any one of the following modification patterns (5′-3′):
   [1133] First strand (5′-3′): Me-F-Me-Me-Me-Me-F-Me-F-Me-Me-Me-Me-F-Me-F-Me-Me-Me-Me-Me-Me-Me, or
   [1134] First strand (5′-3′): Me-F-Me-Me-Me-F-Me-F-Me-Me-Me-Me-Me-F-Me-F-Me-Me-Me-Me-Me-Me-Me, or
   [1135] First strand (5′-3′): Me-F-Me-Me-Me-F-F-F-F-Me-Me-Me-Me-F-Me-F-Me-Me-Me-Me-Me-Me-Me, or
   [1136] First strand (5′-3′): Me-F-Me-Me-Me-Me-F-F-Me-Me-Me-Me-Me-F-Me-F-Me-Me-Me-Me-Me-Me-Me, or
   [1137] First strand (5′-3′): Me-F-Me-Me-Me-Me-Me-F-F-Me-Me-Me-Me-F-Me-F-Me-Me-Me-Me-Me-Me-Me, or
   [1138] First strand (5′-3′): Me-F-Me-Me-Me-F-F-Me-Me-Me-Me-Me-Me-F-Me-F-Me-Me-Me-Me-Me-Me-Me, or
   [1139] First strand (5′-3′): Me-F-Me-Me-Me-Me-Me-Me-Me-Me-Me-Me-Me-F-Me-F-Me-Me-Me-Me-Me-Me-Me,
   [1140] First strand (5′-3′): Me(s) F(s) Me-Me-Me-Me-F-Me-F-Me-Me-Me-Me F-Me-F-Me-Me-Me-Me-Me(s)Me(s) Me, or
   [1141] First strand (5′-3′): Me(s) F(s) Me-Me-Me-F-Me-F-Me-Me-Me-Me-Me F-Me-F-Me-Me-Me-Me-Me(s)Me(s) Me, or
   [1142] First strand (5′-3′): Me(s) F(s) Me-Me-Me-F-F-F-F-Me-Me-Me-Me-F Me-F-Me-Me-Me-Me-Me(s)Me(s) Me, or
   [1143] First strand (5′-3′): Me(s) F(s) Me-Me-Me-Me-F-F-Me-Me-Me-Me-Me F-Me-F-Me-Me-Me-Me-Me(s)Me(s) Me, or
   [1144] First strand (5′-3′): Me(s) F(s) Me-Me-Me-Me-Me-F-F-Me-Me-Me-Me F-Me-F-Me-Me-Me-Me-Me(s)Me(s) Me, or
   [1145] First strand (5′-3′): Me(s) F(s) Me-Me-Me-F-F-Me-Me-Me-Me-Me-Me F-Me-F-Me-Me-Me-Me-Me(s)Me(s) Me, or
   [1146] First strand (5′-3′): Me(s) F(s) Me-Me-Me-Me-Me-Me-Me-Me-Me-Me-Me-F-Me-F-Me-Me-Me-Me-Me(s)Me(s) Me,
   [1147] wherein: (s) is a phosphorothioate internucleoside linkage.
[1148] 25. A nucleic acid for inhibiting expression of a target gene, comprising a duplex region that comprises:
   [1149] a first strand that is at least partially complementary to a portion of RNA transcribed from the target gene, and a second strand that is at least partially complementary to the first strand,
   [1150] wherein nucleosides of said second and first strands comprise a 2′ sugar, abasic and bond modification pattern as follows (5′-3′):
   [1151] Second strand (5′-3′): Me(s)Me(s)Me-Me-Me-Me-F-Me-F-F-F-Me-Me-Me-Me-Me-Me-Me-Me-Me-Me, or
   [1152] Second strand (5′-3′): Me-Me-Me-Me-Me-Me-F-Me-F-F-F-Me-Me-Me Me-Me-Me-Me-Me(s)Me(s)Me, or
   [1153] Second strand (5′-3′): ia-ia-Me-Me-Me-Me-Me-Me-F-Me-F-F-F-Me-Me-Me-Me-Me-Me-Me-Me-Me-Me, or
   [1154] Second strand (5′-3′): Me-Me-Me-Me-Me-Me-F-Me-F-F-F-Me-Me-Me Me-Me-Me-Me-Me-Me-Me-ia-ia, or
   [1155] Second strand (5′-3′): ia-ia-Me(s)Me(s)Me-Me-Me-Me-F-Me-F-F-F-Me-Me-Me-Me-Me-Me-Me-Me-Me-Me, or
   [1156] Second strand (5′-3′): Me-Me-Me-Me-Me-Me-F-Me-F-F-F-Me-Me-Me Me-Me-Me-Me-Me(s)Me(s)Me-ia-ia
   [1157] wherein the 2′-Me or 2′-F modified nucleosides of said first strand include any one of the following modification patterns (5′-3′):
   [1158] First strand (5′-3′): Me-F-Me-Me-Me-F-Me-Me-F-Me-Me-Me-Me-F-Me-F-Me-Me-Me-Me-Me-Me-Me, or
   [1159] First strand (5′-3′): Me-F-Me-Me-Me-Me-F-Me-F-Me-Me-Me-Me-F-Me-F-Me-Me-Me-Me-Me-Me-Me, or
   [1160] First strand (5′-3′): Me-F-Me-Me-Me-F-Me-F-Me-Me-Me-Me-Me-F-Me-F-Me-Me-Me-Me-Me-Me-Me, or
   [1161] First strand (5′-3′): Me-F-Me-Me-Me-F-F-F-F-Me-Me-Me-Me-F-Me-F-Me-Me-Me-Me-Me-Me-Me, or
   [1162] First strand (5′-3′): Me-F-Me-Me-Me-Me-F-F-Me-Me-Me-Me-Me-F-Me-F-Me-Me-Me-Me-Me-Me-Me, or
   [1163] First strand (5′-3′): Me-F-Me-Me-Me-Me-Me-F-F-Me-Me-Me-Me-F-Me-F-Me-Me-Me-Me-Me-Me-Me, or
   [1164] First strand (5′-3′): Me-F-Me-Me-Me-F-F-Me-Me-Me-Me-Me-Me-F-Me-F-Me-Me-Me-Me-Me-Me-Me, or
   [1165] First strand (5′-3′): Me-F-Me-Me-Me-Me-Me-Me-Me-Me-Me-Me-Me-F-Me-F-Me-Me-Me-Me-Me-Me-Me,
   [1166] First strand (5′-3′): Me(s) F(s) Me-Me-Me-F-Me-Me-F-Me-Me-Me-Me F-Me-F-Me-Me-Me-Me-Me(s)Me(s) Me, or
   [1167] First strand (5′-3′): Me(s) F(s) Me-Me-Me-Me-F-Me-F-Me-Me-Me-Me F-Me-F-Me-Me-Me-Me-Me(s)Me(s) Me, or
   [1168] First strand (5′-3′): Me(s) F(s) Me-Me-Me-F-Me-F-Me-Me-Me-Me-Me F-Me-F-Me-Me-Me-Me-Me(s)Me(s) Me, or
   [1169] First strand (5′-3′): Me(s) F(s) Me-Me-Me-F-F-F-F-Me-Me-Me-Me-F Me-F-Me-Me-Me-Me-Me(s)Me(s) Me, or
   [1170] First strand (5′-3′): Me(s) F(s) Me-Me-Me-Me-F-F-Me-Me-Me-Me-Me F-Me-F-Me-Me-Me-Me-Me(s)Me(s) Me, or
   [1171] First strand (5′-3′): Me(s) F(s) Me-Me-Me-Me-Me-F-F-Me-Me-Me-Me F-Me-F-Me-Me-Me-Me-Me(s)Me(s) Me, or
   [1172] First strand (5′-3′): Me(s) F(s) Me-Me-Me-F-F-Me-Me-Me-Me-Me-Me F-Me-F-Me-Me-Me-Me-Me(s)Me(s) Me, or
   [1173] First strand (5′-3′): Me(s) F(s) Me-Me-Me-Me-Me-Me-Me-Me-Me-Me-Me-F-Me-F-Me-Me-Me-Me-Me(s)Me(s) Me,
   [1174] wherein:
   [1175] (s) is a phosphorothioate internucleoside linkage,
   [1176] ia represents an inverted abasic nucleoside, and when the inverted abasic nucleosides as represented by ia-ia are present at the 3′ terminus of the second strand, said inverted abasic nucleosides are typically present in a 2 nucleoside overhang.
[1177] 26. A nucleic acid according to any preceding sentence, wherein said first strand comprises at least 17 contiguous nucleosides differing by 0 or 1 nucleosides from any one of the first strand sequences as listed in Table 2.
[1178] 27. A nucleic acid according to any preceding sentence, wherein said first strand comprises at least 17 contiguous nucleosides differing by 0 or 1 nucleosides from any one of the first strand sequences as listed in Table 3.
[1179] 28. A nucleic acid according to sentence 26 or 27, wherein the first strand comprises nucleosides 2-18 of any one of the sequences defined in sentence 26 or 27.
[1180] 29. A nucleic acid according to any preceding sentence, wherein the second strand comprises a nucleoside sequence of at least 17 contiguous nucleosides differing by 0 or 1 nucleosides from any one of the second strand sequences as listed in Table 2, and wherein the second strand has a region of at least 85% complementarity over the 17 contiguous nucleosides to the first strand.
[1181] 30. A nucleic acid according to any preceding sentence, wherein the second strand comprises a nucleoside sequence of at least 17 contiguous nucleosides differing by 0 or 1 nucleosides from any one of the second strand sequences as listed in Table 4, and wherein the second strand has a region of at least 85% complementarity over the 17 contiguous nucleosides to the first strand.
[1182] 31. A nucleic acid according to any preceding sentence, wherein the first strand comprises any one of the first strand sequences as listed in Table 2.
[1183] 32. A nucleic acid according to any preceding sentence, wherein the first strand comprises any one of the first strand sequences as listed in Table 3.
[1184] 33. A nucleic acid according to any preceding sentence, wherein the second strand comprises any one of the second strand sequences as listed in Table 2.
[1185] 34. A nucleic acid according to any preceding sentence, wherein the second strand comprises any one of the second strand sequences as listed in Table 4.
[1186] 35. A nucleic acid according to any preceding sentence, wherein the nucleic acid is an siRNA oligonucleoside.
[1187] 36. A nucleic acid according to any preceding sentence, wherein the nucleic acid is conjugated directly or indirectly to one or more ligand moieties, optionally wherein said ligand moiety is present at a terminal region of the second strand, typically at the 3′ terminal region thereof.
[1188] 37. A nucleic acid according to sentence 36, wherein the ligand moiety comprises:
   [1189] (i) one or more N-acetyl galactosamine (GalNAc) ligands, and/or
   [1190] (ii) one or more N-acetyl galactosamine (GalNAc) ligand derivatives, and/or
   [1191] (iii) one or more N-acetyl galactosamine (GalNAc) ligands and/or derivatives thereof, conjugated to the nucleic acid through a linker.
[1192] 38. A nucleic acid according to sentence 37, wherein said one or more GalNAc ligands and/or GalNAc ligand derivatives are conjugated directly or indirectly to the 5′ or 3′ terminal region of the second strand of the nucleic acid, typically at the 3′ terminal region thereof.
[1193] 39. A nucleic acid according to any one of sentences 36 to 38, wherein the ligand moiety comprises the following structure:

[chemical structure]

[1194] 40. A nucleic acid according to any one of sentences 36 to 39, having the structure:

[chemical structure]

[1195] wherein:
[1196] R₁ at each occurrence is independently selected from the group consisting of hydrogen, methyl and ethyl;
[1197] R₂ is selected from the group consisting of hydrogen, hydroxy, —OC₁₋₃alkyl, —C(═O)OC₁₋₃alkyl, halo and nitro;
[1198] X₁ and X₂ at each occurrence are independently selected from the group consisting of methylene, oxygen and sulfur;
[1199] m is an integer of from 1 to 6;
[1200] n is an integer of from 1 to 10;
[1201] q, r, s, t, v are independently integers from 0 to 4, with the proviso that:
[1202] (i) q and r cannot both be 0 at the same time; and
[1203] (ii) s, t and v cannot all be 0 at the same time;
[1204] Z is an oligonucleoside.
[1205] 41. A nucleic acid according to any one of sentences 36 to 39, having the structure:

[chemical structure]

[1206] wherein:
[1207] r and s are independently an integer selected from 1 to 16; and
[1208] Z is an oligonucleoside.
[1209] 42. A pharmaceutical composition comprising a nucleic acid according to any preceding sentence, in combination with a pharmaceutically acceptable excipient or carrier.
[1210] 43. A nucleic acid or pharmaceutical composition according to any preceding sentence, for use in therapy.
[1211] 44. A nucleic acid or pharmaceutical composition according to any preceding sentence, for use in prevention or treatment of a disease related to a disorder of haemostasis, such as a disease related to a disorder of haemostasis, such as haemophilia.
[1212] 45. A nucleic acid or pharmaceutical composition according to any preceding sentence, for use in prevention or treatment of diabetes.
[1213] 46. A nucleic acid or pharmaceutical composition according to any preceding sentence, for use in prevention or treatment of cardiovascular disease.

[1214] In one aspect, the present invention may be applied in the compounds, processes, compositions or uses of the following Sentences numbered 1-101 wherein reference to any Formula in the Sentences 1-101 refers only to those Formulas that are defined within Sentences 1-101. These formulae are reproduced in FIG. 5. Specifically, an oligonucleoside moiety as represented by Z in any of the following sentences can comprise a nucleic acid for inhibiting expression of ZPI or HCII as defined hereinafter.
[1215] 1. A compound comprising the following structure:

[chemical structure]

[1216] wherein:
[1217] R₁ at each occurrence is independently selected from the group consisting of hydrogen, methyl and ethyl;
[1218] R₂ is selected from the group consisting of hydrogen, hydroxy, —OC₁₋₃alkyl, —C(═O)OC₁₋₃alkyl, halo and nitro;
[1219] X₁ and X₂ at each occurrence are independently selected from the group consisting of methylene, oxygen and sulfur;
[1220] m is an integer of from 1 to 6;
[1221] n is an integer of from 1 to 10;
[1222] q, r, s, t, v are independently integers from 0 to 4, with the proviso that:
[1223] (i) q and r cannot both be 0 at the same time; and
[1224] (ii) s, t and v cannot all be 0 at the same time;
[1225] Z is an oligonucleoside moiety.
[1226] 2. A compound according to Sentence 1, wherein R₁ is hydrogen at each occurrence.
[1227] 3. A compound according to Sentence 1, wherein R₁ is methyl.
[1228] 4. A compound according to Sentence 1, wherein R₁ is ethyl.
[1229] 5. A compound according to any of Sentences 1 to 4, wherein R₂ is hydroxy.
[1230] 6. A compound according to any of Sentences 1 to 4, wherein R₂ is halo.
[1231] 7. A compound according to Sentence 6, wherein R₂ is fluoro.
[1232] 8. A compound according to Sentence 6, wherein R₂ is chloro.
[1233] 9. A compound according to Sentence 6, wherein R₂ is bromo.
[1234] 10. A compound according to Sentence 6, wherein R₂ is iodo.
[1235] 11. A compound according to Sentence 6, wherein R₂ is nitro.
[1236] 12. A compound according to any of Sentences 1 to 11, wherein X₁ is methylene.
[1237] 13. A compound according to any of Sentences 1 to 11, wherein X₁ is oxygen.
[1238] 14. A compound according to any of Sentences 1 to 11, wherein X₁ is sulfur.
[1239] 15. A compound according to any of Sentences 1 to 14, wherein X₂ is methylene.
[1240] 16. A compound according to any of Sentences 1 to 15, wherein X₂ is oxygen.
[1241] 17. A compound according to any of Sentences 1 to 16, wherein X₂ is sulfur.
[1242] 18. A compound according to any of Sentences 1 to 17, wherein m=3.
[1243] 19. A compound according to any of Sentences 1 to 18, wherein n=6.
[1244] 20. A compound according to Sentences 13 and 15, wherein X₁ is oxygen and X₂ is methylene, and preferably wherein:

$$q = 1 ,$$

$$r = 2 ,$$

$$s = 1 ,$$

$$t = 1 ,$$

$$v = 1 .$$

[1245] 21. A compound according to Sentences 12 and 15, wherein both X₁ and X₂ are methylene, and preferably wherein:

$$q = 1 ,$$

$$r = 3 ,$$

$$s = 1 ,$$

$$t = 1 ,$$

$$v = 1 .$$

[1246] 22. A compound according to any of Sentences 1 to 21, wherein Z is:

[chemical structure]

[1247] wherein:
[1248] Z₁, Z₂, Z₃, Z₄ are independently at each occurrence oxygen or sulfur; and
[1249] one the bonds between P and Z₂, and P and Z₃ is a single bond and the other bond is a double bond.
[1250] 23. A compound according to Sentence 22, wherein said oligonucleoside is an RNA compound capable of modulating, preferably inhibiting, expression of a target gene.
[1251] 24. A compound according to Sentence 23, wherein said RNA compound comprises an RNA duplex comprising first and second strands, wherein the first strand is at least partially complementary to an RNA sequence of a target gene, and the second strand is at least partially complementary to said first strand, and wherein each of the first and second strands have 5′ and 3′ ends.
[1252] 25. A compound according to Sentence 24, wherein the RNA compound is attached at the 5′ end of its second strand to the adjacent phosphate.
[1253] 26. A compound according to Sentence 24, wherein the RNA compound is attached at the 3′ end of its second strand to the adjacent phosphate.
[1254] 27. A compound of Formula (II):

[chemical structure]

[1255] 28. A compound of Formula (III):

[chemical structure]

[1256] 29. A compound according to Sentence 27 or 28, wherein the oligonucleoside comprises an RNA duplex comprising first and second strands, wherein the first strand is at least partially complementary to an RNA sequence of a target gene, and the second strand is at least partially complementary to said first strand, and wherein each of the first and second strands have 5′ and 3′ ends, and wherein said RNA duplex is attached at the 5′ end of its second strand to the adjacent phosphate.
[1257] 30. A composition comprising a compound of Formula (II) as defined in Sentence 27, and a compound of Formula (III) as defined in Sentence 28, optionally dependent on Sentence 29.
[1258] 31. A composition according to Sentence 30, wherein said compound of Formula (III) as defined in Sentence 28 is present in an amount in the range of 10 to 15% by weight of said composition.
[1259] 32. A compound of Formula (IV):

[chemical structure]

[1260] 33. A compound of Formula (V):

[chemical structure]

[1261] 34. A compound according to Sentence 32 or 33, wherein the oligonucleoside comprises an RNA duplex comprising first and second strands, wherein the first strand is at least partially complementary to an RNA sequence of a target gene, and the second strand is at least partially complementary to said first strand, and wherein each of the first and second strands have 5′ and 3′ ends, and wherein said RNA duplex is attached at the 3′ end of its second strand to the adjacent phosphate.
[1262] 35. A composition comprising a compound of Formula (IV) as defined in Sentence 32, and a compound of Formula (V) as defined in Sentence 33, optionally dependent on Sentence 34.
[1263] 36. A composition according to Sentence 35, wherein said compound of Formula (V) as defined in Sentence 33 is present in an amount in the range of 10 to 15% by weight of said composition.
[1264] 37. A compound as defined in any of Sentences 1 to 29, or 32 to 34, wherein the oligonucleoside comprises an RNA duplex which further comprises one or more riboses modified at the 2′ position, preferably a plurality of riboses modified at the 2′ position.
[1265] 38. A compound according to Sentence 37, wherein the modifications are chosen from 2′-O-methyl, 2′-deoxy-fluoro, and 2′-deoxy.
[1266] 39. A compound according to any of Sentences 1 to 29, or 32 to 34, or 37 to 38, wherein the oligonucleoside further comprises one or more degradation protective moieties at one or more ends.
[1267] 40. A compound according to Sentence 39, wherein said one or more degradation protective moieties are not present at the end of the oligonucleoside strand that carries the ligand moieties, and/or wherein said one or more degradation protective moieties is selected from phosphorothioate internucleoside linkages, phosphorodithioate internucleoside linkages and inverted abasic nucleosides, wherein said inverted abasic nucleosides are present at the distal end of the strand that carries the ligand moieties.
[1268] 41. A compound according to any of Sentences 1 to 29, or 32 to 34, or 37 to 40, wherein said ligand moiety as depicted in Formula (I) in Sentence 1 comprises one or more ligands.
[1269] 42. A compound according to Sentence 41, wherein said ligand moiety as depicted in Formula (I) in Sentence 1 comprises one or more carbohydrate ligands.
[1270] 43. A compound according to Sentence 42, wherein said one or more carbohydrates can be a monosaccharide, disaccharide, trisaccharide, tetrasaccharide, oligosaccharide or polysaccharide.
[1271] 44. A compound according to Sentence 43, wherein said one or more carbohydrates comprise one or more galactose moieties, one or more lactose moieties, one or more N-AcetylGalactosamine moieties, and/or one or more mannose moieties.
[1272] 45. A compound according to Sentence 44, wherein said one or more carbohydrates comprise one or more N-Acetyl-Galactosamine moieties.
[1273] 46. A compound according to Sentence 45, which comprises two or three N-AcetylGalactosamine moieties.
[1274] 47. A compound according to any of Sentences 41 to 46, wherein said one or more ligands are attached in a linear configuration, or in a branched configuration.
[1275] 48. A compound according to Sentence 47, wherein said one or more ligands are attached as a biantennary or triantennary branched configuration.
[1276] 49. A compound according to Sentences 46 to 48, wherein said moiety:

[chemical structure]

[1277] as depicted in Formula (I) in Sentence 1 is any of Formulae (VIa), (VIb) or (VIc), preferably Formula (VIa):

[chemical structure]

[1278] wherein:
[1279] A₁ is hydrogen, or a suitable hydroxy protecting group;
[1280] a is an integer of 2 or 3; and
[1281] b is an integer of 2 to 5; or

[chemical structure]

[1282] wherein:
[1283] A₁ is hydrogen, or a suitable hydroxy protecting group;
[1284] a is an integer of 2 or 3; and
[1285] c and d are independently integers of 1 to 6; or

[chemical structure]

[1286] wherein:
[1287] A₁ is hydrogen, or a suitable hydroxy protecting group;
[1288] a is an integer of 2 or 3; and
[1289] e is an integer of 2 to 10.
[1290] 50. A compound according to Sentences 46 to 48, wherein said moiety:

[chemical structure]

[1291] as depicted in Formula (I) in Sentence 1 is Formula (VII):

[chemical structure]

[1292] wherein:
[1293] A₁ is hydrogen;
[1294] a is an integer of 2 or 3.
[1295] 51. A compound according to Sentence 49 or 50, wherein a=2.
[1296] 52. A compound according to Sentence 49 or 50, wherein a=3.
[1297] 53. A compound according to Sentence 49, wherein b=3.
[1298] 54. A compound of Formula (VIII):

[chemical structure]

[1299] 55. A compound of Formula (IX):

[chemical structure]

[1300] 56. A compound according to Sentence 54 or 55, wherein the oligonucleoside comprises an RNA duplex comprising first and second strands, wherein the first strand is at least partially complementary to an RNA sequence of a target gene, and the second strand is at least partially complementary to said first strand, and wherein each of the first and second strands have 5′ and 3′ ends, and wherein said RNA duplex is attached at the 5′ end of its second strand to the adjacent phosphate.
[1301] 57. A composition comprising a compound of Formula (VIII) as defined in Sentence 54, and a compound of Formula (IX) as defined in Sentence 55, optionally dependent on Sentence 56.
[1302] 58. A composition according to Sentence 57, wherein said compound of Formula (IX) as defined in Sentence 55 is present in an amount in the range of 10 to 15% by weight of said composition.
[1303] 59. A compound of Formula (X):

[chemical structure]

[1304] 60. A compound of Formula (XI):

[chemical structure]

[1305] 61. A compound according to Sentence 59 or 60, wherein the oligonucleoside comprises an RNA duplex comprising first and second strands, wherein the first strand is at least partially complementary to an RNA sequence of a target gene, and the second strand is at least partially complementary to said first strand, and wherein each of the first and second strands have 5′ and 3′ ends, and wherein said RNA duplex is attached at the 3′ end of its second strand to the adjacent phosphate.
[1306] 62. A composition comprising a compound of Formula (X) as defined in Sentence 59, and a compound of Formula (XI) as defined in Sentence 60, optionally dependent on Sentence 61.
[1307] 63. A composition according to Sentence 62, wherein said compound of Formula (XI) as defined in Sentence 60 is present in an amount in the range of 10 to 15% by weight of said composition.
[1308] 64. A compound as defined in any of Sentences 54 to 63, wherein the oligonucleoside comprises an RNA duplex which further comprises one or more riboses modified at the 2′ position, preferably a plurality of riboses modified at the 2′ position.
[1309] 65. A compound according to Sentence 64, wherein the modifications are chosen from 2′-O-methyl, 2′-deoxy-fluoro, and 2′-deoxy.
[1310] 66. A compound according to any of Sentences 54 to 65, wherein the oligonucleoside further comprises one or more degradation protective moieties at one or more ends.
[1311] 67. A compound according to Sentence 66, wherein said one or more degradation protective moieties are not present at the end of the oligonucleoside strand that carries the ligand moieties, and/or wherein said one or more degradation protective moieties is selected from phosphorothioate internucleoside linkages, phosphorodithioate internucleoside linkages and inverted abasic nucleosides, wherein said inverted abasic nucleosides are present at the distal end of the strand that carries the ligand moieties, as shown in any of Formulae (VIII), (IX), (X) or (XI) in any of Sentences 54, 55, 59 or 60.
[1312] 68. A process of preparing a compound according to any of Sentences 1 to 29, 32 to 34, 37 to 56, 59 to 61, and 64 to 67, and/or a composition according to any of Sentences 30, 31, 35, 36, 57, 58, 62, 63, which comprises reacting compounds of Formulae (XII) and (XIII):

[chemical structure]

[1313] herein:
[1314] R₁ at each occurrence is independently selected from the group consisting of hydrogen, methyl and ethyl;
[1315] R₂ is selected from the group consisting of hydrogen, hydroxy, —OC₁₋₃alkyl, —C(═O)OC₁₋₃alkyl, halo and nitro;
[1316] X₁ and X₂ at each occurrence are independently selected from the group consisting of methylene, oxygen and sulfur;
[1317] m is an integer of from 1 to 6;
[1318] n is an integer of from 1 to 10;
[1319] q, r, s, t, v are independently integers from 0 to 4, with the proviso that:
[1320] (i) q and r cannot both be 0 at the same time; and
[1321] (ii) s, t and v cannot all be 0 at the same time;
[1322] Z is an oligonucleoside moiety;
[1323] and where appropriate carrying out deprotection of the ligand and/or annealing of a second strand for the oligonucleoside moiety.
[1324] 69. A process according to Sentence 68, wherein a compound of Formula (XII) is prepared by reacting compounds of Formulae (XIV) and (XV):

[chemical structure]

[1325] R₁ at each occurrence is independently selected from the group consisting of hydrogen, methyl and ethyl;
[1326] R₂ is selected from the group consisting of hydrogen, hydroxy, —OC₁₋₃alkyl, —C(═O)OC₁₋₃alkyl, halo and nitro;
[1327] X₁ and X₂ at each occurrence are independently selected from the group consisting of methylene, oxygen and sulfur;
[1328] q, r, s, t, v are independently integers from 0 to 4, with the proviso that:
[1329] (i) q and r cannot both be 0 at the same time; and
[1330] (ii) s, t and v cannot all be 0 at the same time;
[1331] Z is an oligonucleoside moiety.
[1332] 70. A process according to Sentence 68, to prepare a compound according to any of Sentences 20, 25, 27, 29, 54, 56, and/or a composition according to any of Sentences 30, 31, 57, 58, wherein:
[1333] compound of Formula (XII) is Formula (XIIa):

[chemical structure]

[1334] and compound of Formula (XIII) is Formula (XIIIa):

[chemical structure]

[1335] wherein the oligonucleoside comprises an RNA duplex comprising first and second strands, wherein the first strand is at least partially complementary to an RNA sequence of a target gene, and the second strand is at least partially complementary to said first strand, and wherein each of the first and second strands have 5′ and 3′ ends, and wherein said RNA duplex is attached at the 5′ end of its second strand to the adjacent phosphate.
[1336] 71. A process according to Sentence 68, to prepare a compound according to any of Sentences 20, 25, 28, 29, 55, 56, and/or a composition according to any of Sentences 30, 31, 57, 58, wherein:
[1337] compound of Formula (XII) is Formula (XIIb):

[chemical structure]

[1338] and compound of Formula (XIII) is Formula (XIIIa):

[chemical structure]

[1339] wherein the oligonucleoside comprises an RNA duplex comprising first and second strands, wherein the first strand is at least partially complementary to an RNA sequence of a target gene, and the second strand is at least partially complementary to said first strand, and wherein each of the first and second strands have 5′ and 3′ ends, and wherein said RNA duplex is attached at the 5′ end of its second strand to the adjacent phosphate.
[1340] 72. A process according to Sentence 68, to prepare a compound according to any of Sentences 21, 26, 32, 34, 59, 61, and/or a composition according to any of Sentences 35, 36, 62, 63, wherein:
[1341] compound of Formula (XII) is Formula (XIIc):

[chemical structure]

[1342] and compound of Formula (XIII) is Formula (XIIIa):

[chemical structure]

[1343] wherein the oligonucleoside comprises an RNA duplex comprising first and second strands, wherein the first strand is at least partially complementary to an RNA sequence of a target gene, and the second strand is at least partially complementary to said first strand, and wherein each of the first and second strands have 5′ and 3′ ends, and wherein said RNA duplex is attached at the 3′ end of its second strand to the adjacent phosphate.
[1344] 73. A process according to Sentence 68, to prepare a compound according to any of Sentences 21, 26, 33, 34, 60, 61, and/or a composition according to any of Sentences 35, 36, 62, 63, wherein:
[1345] compound of Formula (XII) is Formula (XIId):

[chemical structure]

[1346] and compound of Formula (XIII) is Formula (XIIIa):

[chemical structure]

[1347] wherein the oligonucleoside comprises an RNA duplex comprising first and second strands, wherein the first strand is at least partially complementary to an RNA sequence of a target gene, and the second strand is at least partially complementary to said first strand, and wherein each of the first and second strands have 5′ and 3′ ends, and wherein said RNA duplex is attached at the 3′ end of its second strand to the adjacent phosphate.
[1348] 74. A process according to any of Sentences 70 to 73, wherein:
[1349] compound of Formula (XIIIa) is Formula (XIIIb):

[chemical structure]

[1350] 75. A process according to Sentences 69, as dependent on Sentences 70 to 73, wherein: compound of Formula (XIV) is either Formula (XIVa) or Formula (XIVb):

[chemical structure]

[1351] and compound of Formula (XV) is either Formula (XVa) or Formula (XIVb):

[chemical structure]

[1352] wherein the oligonucleoside comprises an RNA duplex comprising first and second strands, wherein the first strand is at least partially complementary to an RNA sequence of a target gene, and the second strand is at least partially complementary to said first strand, and wherein each of the first and second strands have 5′ and 3′ ends, and wherein (i) said RNA duplex is attached at the 5′ end of its second strand to the adjacent phosphate in Formula (XVa), or (ii) said RNA duplex is attached at the 3′ end of its second strand to the adjacent phosphate in Formula (XVb). 76. A compound of Formula (XII):

[chemical structure]

[1353] wherein:
[1354] R₁ at each occurrence is independently selected from the group consisting of hydrogen, methyl and ethyl;
[1355] R₂ is selected from the group consisting of hydrogen, hydroxy, —OC₁₋₃alkyl, —C(═O)OC₁₋₃alkyl, halo and nitro;
[1356] X₁ and X₂ at each occurrence are independently selected from the group consisting of methylene, oxygen and sulfur;
[1357] q, r, s, t, v are independently integers from 0 to 4, with the proviso that:
[1358] (i) q and r cannot both be 0 at the same time; and
[1359] (ii) s, t and v cannot all be 0 at the same time;
[1360] Z is an oligonucleoside moiety.
[1361] 77. A compound of Formula (XIIa):

[chemical structure]

[1362] 78. A compound of Formula (XIIb):

[chemical structure]

[1363] 79. A compound of Formula (XIIc):

[chemical structure]

[1364] 80. A compound of Formula (XIId):

[chemical structure]

[1365] 81. A compound of Formula (XIII):

[chemical structure]

[1366] wherein:
[1367] R₁ at each occurrence is independently selected from the group consisting of hydrogen, methyl and ethyl;
[1368] m is an integer of from 1 to 6;
[1369] n is an integer of from 1 to 10.
[1370] 82. A compound of Formula (XIIIa):

[chemical structure]

[1371] 83. A compound of Formula (XIIIb):

[chemical structure]

[1372] 84. A compound of Formula (XIV):

[chemical structure]

[1373] wherein:
[1374] R₁ is selected from the group consisting of hydrogen, methyl and ethyl;
[1375] R₂ is selected from the group consisting of hydrogen, hydroxy, —OC₁₋₃alkyl, —C(═O)OC₁₋₃alkyl, halo and nitro;
[1376] X₂ is selected from the group consisting of methylene, oxygen and sulfur;
[1377] s, t, v are independently integers from 0 to 4, with the proviso that s, t and v cannot all be 0 at the same time.
[1378] 85. A compound of Formula (XIVa):

[chemical structure]

[1379] 86. A compound of Formula (XIVb):

[chemical structure]

[1380] 87. A compound of Formula (XV):

[chemical structure]

[1381] wherein:
[1382] R₁ at each occurrence is independently selected from the group consisting of hydrogen, methyl and ethyl;
[1383] X₁ is selected from the group consisting of methylene, oxygen and sulfur;
[1384] q and r are independently integers from 0 to 4, with the proviso that q and r cannot both be 0 at the same time;
[1385] Z is an oligonucleoside moiety.
[1386] 88. A compound of Formula (XVa):

[chemical structure]

[1387] 89. A compound of Formula (XVb):

[chemical structure]

[1388] 90. Use of a compound according to any of Sentences 76, 81 to 84, 87, for the preparation of a compound according to any of Sentences 1 to 29, 32 to 34, 37 to 56, 59 to 61, and 64 to 67, and/or a composition according to any of Sentences 30, 31, 35, 36, 57, 58, 62 and 63.
[1389] 91. Use of a compound according to Sentence 85, for the preparation of a compound according to any of Sentences 1 to 29, 32 to 34, 37 to 56, 59 to 61, and 64 to 67, and/or a composition according to any of Sentences 30, 31, 35, 36, 57, 58, 62 and 63, wherein R₂=F.
[1390] 92. Use of a compound according to Sentence 86, for the preparation of a compound according to any of Sentences 1 to 29, 32 to 34, 37 to 56, 59 to 61, and 64 to 67, and/or a composition according to any of Sentences 30, 31, 35, 36, 57, 58, 62 and 63, wherein R₂=OH.
[1391] 93. Use of a compound according to Sentence 77, for the preparation of a compound according to any of Sentences 20, 25, 27, 29, 54, 56, and/or a composition according to any of Sentences 30, 31, 57, 58.
[1392] 94. Use of a compound according to Sentence 78, for the preparation of a compound according to any of Sentences 20, 25, 28, 29, 55, 56, and/or a composition according to any of Sentences 30, 31, 57, 58.
[1393] 95. Use of a compound according to Sentence 79, for the preparation of a compound according to any of Sentences 21, 26, 32, 34, 59, 61, and/or a composition according to any of Sentences 35, 36, 62, 63.
[1394] 96. Use of a compound according to Sentence 80, for the preparation of a compound according to any of Sentences 21, 26, 33, 34, 60, 61, and/or a composition according to any of Sentences 35, 36, 62, 63.
[1395] 97. Use of a compound according to Sentence 88, for the preparation of a compound according to any of Sentences 20, 25, 27 to 29, 54 to 56, and/or a composition according to any of Sentences 30, 31, 57, 58.
[1396] 98. Use of a compound according to Sentence 89, for the preparation of a compound according to any of Sentences 21, 26, 32 to 34, 59 to 61, and/or a composition according to any of Sentences 35, 36, 62, 63.
[1397] 99. A compound or composition obtained, or obtainable by a process according to any of Sentences 68 to 75.
[1398] 100. A pharmaceutical composition comprising of a compound according to any of Sentences 1 to 29, 32 to 34, 37 to 56, 59 to 61, and 64 to 67, and/or a composition according to any of Sentences 30, 31, 35, 36, 57, 58, 62 and 63, together with a pharmaceutically acceptable carrier, diluent or excipient.
[1399] 101. A compound according to any of Sentences 1 to 29, 32 to 34, 37 to 56, 59 to 61, and 64 to 67, and/or a composition according to any of Sentences 30, 31, 35, 36, 57, 58, 62 and 63, for use in therapy.

[1400] In another aspect, the present invention may be applied in the compounds, processes, compositions or uses of the following Clauses numbered 1-56 wherein reference to any Formula in the Clauses refers only to those Formulas that are defined within Clause 1-56.

[1401] These formulae are reproduced in FIG. 6. Specifically, an oligonucleoside moiety as represented by Z in any of the following clauses can comprise a nucleic acid for inhibiting expression of ZPI or HCII as defined hereinafter.
[1402] 1. A compound comprising the following structure:

[chemical structure]

[1403] wherein:
[1404] r and s are independently an integer selected from 1 to 16; and
[1405] Z is an oligonucleoside moiety.
[1406] 2. A compound according to Clause 1, wherein s is an integer selected from 4 to 12.
[1407] 3. A compound according to Clause 2, wherein s is 6.
[1408] 4. A compound according to any of Clauses 1 to 3, wherein r is an integer selected from 4 to 14.
[1409] 5. A compound according to Clause 4, wherein r is 6.
[1410] 6. A compound according to Clause 4, wherein r is 12.
[1411] 7. A compound according to Clause 5, which is dependent on Clause 3.
[1412] 8. A compound according to Clause 6, which is dependent on Clause 3.
[1413] 9. A compound according to any of Clauses 1 to 8, wherein Z is:

[chemical structure]

[1414] wherein:
[1415] Z₁, Z₂, Z₃, Z₄ are independently at each occurrence oxygen or sulfur; and
[1416] one the bonds between P and Z₂, and P and Z₃ is a single bond and the other bond is a double bond.
[1417] 10. A compound according to any of Clauses 1 to 9, wherein said oligonucleoside is an RNA compound capable of modulating, preferably inhibiting, expression of a target gene.
[1418] 11. A compound according to any of Clause 10, wherein said RNA compound comprises an RNA duplex comprising first and second strands, wherein the first strand is at least partially complementary to an RNA sequence of a target gene, and the second strand is at least partially complementary to said first strand, and wherein each of the first and second strands have 5′ and 3′ ends.
[1419] 12. A compound according to Clause 11, preferably also dependent on Clauses 3 and 6, wherein the RNA compound is attached at the 5′ end of its second strand to the adjacent phosphate.
[1420] 13. A compound according to Clause 11, preferably also dependent on Clauses 3 and 5, wherein the RNA compound is attached at the 3′ end of its second strand to the adjacent phosphate.
[1421] 14. A compound of Formula (II), preferably dependent on Clause 12:

[chemical structure]

15. A compound of Formula (III), preferably dependent on Clause 13:

[chemical structure]

[1422] 16. A compound as defined in any of Clauses 1 to 15, wherein the oligonucleoside comprises an RNA duplex which further comprises one or more riboses modified at the 2′ position, preferably a plurality of riboses modified at the 2′ position.
[1423] 17. A compound according to Clause 16, wherein the modifications are chosen from 2′-O-methyl, 2′-deoxy-fluoro, and 2′-deoxy.
[1424] 18. A compound according to any of Clauses 1 to 17, wherein the oligonucleoside further comprises one or more degradation protective moieties at one or more ends.
[1425] 19. A compound according to Clause 18, wherein said one or more degradation protective moieties are not present at the end of the oligonucleoside strand that carries the linker/ligand moieties, and/or wherein said one or more degradation protective moieties is selected from phosphorothioate internucleoside linkages, phosphorodithioate internucleoside linkages and inverted abasic nucleosides, wherein said inverted abasic nucleosides are present at the distal end of the same strand to the end that carries the linker/ligand moieties.
[1426] 20. A compound according to any of Clauses 1 to 19, wherein said ligand moiety as depicted in Formula (I) in Clause 1 comprises one or more ligands.
[1427] 21. A compound according to Clause 20, wherein said ligand moiety as depicted in Formula (I) in Clause 1 comprises one or more carbohydrate ligands.
[1428] 22. A compound according to Clause 21, wherein said one or more carbohydrates can be a monosaccharide, disaccharide, trisaccharide, tetrasaccharide, oligosaccharide or polysaccharide.
[1429] 23. A compound according to Clause 22, wherein said one or more carbohydrates comprise one or more galactose moieties, one or more lactose moieties, one or more N-AcetylGalactosamine moieties, and/or one or more mannose moieties.
[1430] 24. A compound according to Clause 23, wherein said one or more carbohydrates comprise one or more N-Acetyl-Galactosamine moieties.
[1431] 25. A compound according to Clause 24, which comprises two or three N-AcetylGalactosamine moieties.
[1432] 26. A compound according to any of the preceding Clauses, wherein said one or more ligands are attached in a linear configuration, or in a branched configuration.
[1433] 27. A compound according to Clause 26, wherein said one or more ligands are attached as a biantennary or triantennary branched configuration.
[1434] 28. A compound according to Clauses 20 to 27, wherein said moiety:

[chemical structure]

[1435] as depicted in Formula (I) in Clause 1 is any of Formulae (IV), (V) or (VI), preferably Formula (IV):

[chemical structure]

[1436] wherein:
[1437] A₁ is hydrogen, or a suitable hydroxy protecting group;
[1438] a is an integer of 2 or 3; and
[1439] b is an integer of 2 to 5; or

[chemical structure]

[1440] wherein:
[1441] A₁ is hydrogen, or a suitable hydroxy protecting group;
[1442] a is an integer of 2 or 3; and
[1443] c and d are independently integers of 1 to 6; or

[chemical structure]

[1444] wherein:
[1445] A₁ is hydrogen, or a suitable hydroxy protecting group;
[1446] a is an integer of 2 or 3; and
[1447] e is an integer of 2 to 10.
[1448] 29. A compound according to any of Clauses 1 to 28, wherein said moiety:

[chemical structure]

[1449] as depicted in Formula (I) in Clause 1 is Formula (VII):

[chemical structure]

[1450] wherein:
[1451] A₁ is hydrogen;
[1452] a is an integer of 2 or 3.
[1453] 30. A compound according to Clause 28 or 29, wherein a=2.
[1454] 31. A compound according to Clause 28 or 29, wherein a=3.
[1455] 32. A compound according to Clause 28, wherein b=3.
[1456] 33. A compound of Formula (VIII):

[chemical structure]

[1457] 34. A compound of Formula (IX):

[chemical structure]

[1458] 35. A compound according to Clause 33 or 34, wherein the oligonucleoside comprises an RNA duplex which further comprises one or more riboses modified at the 2′ position, preferably a plurality of riboses modified at the 2′ position.
[1459] 36. A compound according to Clause 35, wherein the modifications are chosen from 2′-O-methyl, 2′-deoxy-fluoro, and 2′-deoxy.
[1460] 37. A compound according to any of Clauses 33 to 36, wherein the oligonucleoside further comprises one or more degradation protective moieties at one or more ends.
[1461] 38. A compound according to Clause 37, wherein said one or more degradation protective moieties are not present at the end of the oligonucleoside strand that carries the linker/ligand moieties, and/or wherein said one or more degradation protective moieties is selected from phosphorothioate internucleoside linkages, phosphorodithioate internucleoside linkages and inverted abasic nucleosides, wherein said inverted abasic nucleosides are present at the distal end of the same strand to the end that carries the linker/ligand moieties.
[1462] 39. A compound according to Clause 33, wherein the oligonucleoside comprises an RNA duplex comprising first and second strands, wherein the first strand is at least partially complementary to an RNA sequence of a target gene, and the second strand is at least partially complementary to said first strand, and wherein each of the first and second strands have 5′ and 3′ ends, and wherein said RNA duplex is attached at the 5′ end of its second strand to the adjacent phosphate.
[1463] 40. A compound according to Clause 34, wherein the oligonucleoside comprises an RNA duplex comprising first and second strands, wherein the first strand is at least partially complementary to an RNA sequence of a target gene, and the second strand is at least partially complementary to said first strand, and wherein each of the first and second strands have 5′ and 3′ ends, and wherein said RNA duplex is attached at the 3′ end of its second strand to the adjacent phosphate.
[1464] 41. A process of preparing a compound according to any of Clauses 1 to 40, which comprises reacting compounds of Formulae (X) and (XI):

[chemical structure]

[1465] wherein:
[1466] r and s are independently an integer selected from 1 to 16; and
[1467] Z is an oligonucleoside moiety;
[1468] and where appropriate carrying out deprotection of the ligand and/or annealing of a second strand for the oligonucleoside.
[1469] 42. A process according to Clause 41, to prepare a compound according to any of Clauses 6, 8 to 14, 16 to 33, and 35 to 40, wherein:
[1470] compound of Formula (X) is Formula (Xa):

[chemical structure]

[1471] and compound of Formula (XI) is Formula (XIa):

[chemical structure]

[1472] wherein the oligonucleoside comprises an RNA duplex comprising first and second strands, wherein the first strand is at least partially complementary to an RNA sequence of a target gene, and the second strand is at least partially complementary to said first strand, and wherein each of the first and second strands have 5′ and 3′ ends, and wherein said RNA duplex is attached at the 5′ end of its second strand to the adjacent phosphate.
[1473] 43. A process according to Clause 41, to prepare a compound according to any of Clauses 5, 7, 9 to 13, 15 to 32, and 34 to 40, wherein:
[1474] compound of Formula (X) is Formula (Xb):

[chemical structure]

[1475] and compound of Formula (XI) is Formula (XIa):

[chemical structure]

[1476] wherein the oligonucleoside comprises an RNA duplex comprising first and second strands, wherein the first strand is at least partially complementary to an RNA sequence of a target gene, and the second strand is at least partially complementary to said first strand, and wherein each of the first and second strands have 5′ and 3′ ends, and wherein said RNA duplex is attached at the 3′ end of its second strand to the adjacent phosphate.
[1477] 44. A process according to Clauses 42 or 43, wherein:
[1478] compound of Formula (XIa) is Formula (XIb):

[chemical structure]

[1479] 45. A compound of Formula (X):

[chemical structure]

[1480] wherein:
[1481] r is independently an integer selected from 1 to 16; and
[1482] Z is an oligonucleoside moiety.
[1483] 46. A compound of Formula (Xa):

[chemical structure]

[1484] 47. A compound of Formula (Xb):

[chemical structure]

[1485] 48. A compound of Formula (XI):

[chemical structure]

[1486] wherein:
[1487] s is independently an integer selected from 1 to 16; and
[1488] Z is an oligonucleoside moiety.
[1489] 49. A compound of Formula (XIa):

[chemical structure]

[1490] 50. A compound of Formula (XIb):

[chemical structure]

[1491] 51. Use of a compound according to any of Clauses 45 and 48 to 50, for the preparation of a compound according to any of Clauses 1 to 40.
[1492] 52. Use of a compound according to Clause 46, for the preparation of a compound according to any of Clauses 6, 8 to 14, 16 to 33, and 35 to 40.
[1493] 53. Use of a compound according to Clause 47, for the preparation of a compound according to any of Clauses 5, 7, 9 to 13, 15 to 32, and 34 to 40.
[1494] 54. A compound or composition obtained, or obtainable by a process according to any of Clauses 41 to 44.
[1495] 55. A pharmaceutical composition comprising of a compound according to any of Clauses 1 to 40, together with a pharmaceutically acceptable carrier, diluent or excipient.
[1496] 56. A compound according to any of Clauses 1 to 40, for use in therapy.

### EXAMPLES

[1497] The invention will be more fully understood by reference to the following examples. They should not, however, be construed as limiting the scope of the invention. It is understood that the examples and embodiments described herein are for illustrative purposes only and that various modifications or changes in light thereof will be suggested to persons skilled in the art and are to be included within the spirit and purview of this application and scope of the appended Clauses.

### Example 1: Synthesis of Tether 1

General Experimental conditions:

[1498] Thin layer chromatography (TLC) was performed on silica-coated aluminium plates with fluorescence indicator 254 nm from Macherey-Nagel. Compounds were visualized under UV light (254 nm), or after spraying with the 5% H₂SO₄ in methanol (MeOH) or ninhydrin reagent according to Stahl (from Sigma-Aldrich), followed by heating. Flash chromatography was performed with a Biotage Isolera One flash chromatography instrument equipped with a dual variable UV wavelength detector (200-400 nm) using Biotage Sfar Silica 10, 25, 50 or 100 g columns (Uppsala, Sweden).

[1499] All moisture-sensitive reactions were carried out under anhydrous conditions using dry glassware, anhydrous solvents, and argon atmosphere. All commercially available reagents were purchased from Sigma-Aldrich and solvents from Carl Roth GmbH+Co. KG. D-Galactosamine pentaacetate was purchased from AK scientific.

[1500] HPLC/ESI-MS was performed on a Dionex UltiMate 3000 RS UHPLC system and Thermo Scientific MSQ Plus Mass spectrometer using an Acquity UPLC Protein BEH C4 column from Waters (300 Å, 1.7 μm, 2.1×100 mm) at 60° C. The solvent system consisted of solvent A with H₂O containing 0.1% formic acid and solvent B with acetonitrile (ACN) containing 0.1% formic acid. A gradient from 5-100% of B over 15 min with a flow rate of 0.4 mL/min was employed. Detector and conditions: Corona ultra-charged aerosol detection (from esa). Nebulizer Temp.: 25° C. N₂ pressure: 35.1 psi. Filter: Corona.

[1501] ¹H and ¹³C NMR spectra were recorded at room temperature on a Varian spectrometer at 500 MHz (¹H NMR) and 125 MHz (¹³C NMR). Chemical shifts are given in ppm referenced to the solvent residual peak (CDCl₃—¹H NMR: 6 at 7.26 ppm and ¹³C NMR 6 at 77.2 ppm; DMSO-d₆—1H NMR: 6 at 2.50 ppm and ¹³C NMR 6 at 39.5 ppm). Coupling constants are given in Hertz. Signal splitting patterns are described as singlet (s), doublet (d), triplet (t) or multiplet (m).

### Synthesis Route for the Conjugate Building Block TriGalNAc_Tether1:

[chemical structure]

[1502] Preparation of compound 2: D-Galactosamine pentaacetate (3.00 g, 7.71 mmol, 1.0 eq.) was dissolved in anhydrous dichloromethane (DCM) (30 mL) under argon and trimethylsilyl trifluoromethanesulfonate (TMSOTf, 4.28 g, 19.27 mmol, 2.5 eq.) was added. The reaction was stirred at room temperature for 3 h. The reaction mixture was diluted with DCM (50 mL) and washed with cold saturated aq. NaHCO₃ (100 mL) and water (100 mL). The organic layer was separated, dried over Na₂SO₄ and concentrated to afford the title compound as yellow oil, which was purified by flash chromatography (gradient elution: 0-10% MeOH in DCM in 10 CV). The product was obtained as colourless oil (2.5 g, 98%, rf=0.45 (2% MeOH in DCM)).

[chemical structure]

[1503] Preparation of compound 4: Compound 2 (2.30 g, 6.98 mmol, 1.0 eq.) and azido-PEG3-OH (1.83 g, 10.5 mmol, 1.5 eq.) were dissolved in anhydrous DCM (40 mL) under argon and molecular sieves 3 Å (5 g) were added to the solution. The mixture was stirred at room temperature for 1 h. TMSOTf (0.77 g, 3.49 mmol, 0.5 eq.) was then added to the mixture and the reaction was stirred overnight. The molecular sieves were filtered, the filtrate was diluted with DCM (100 mL) and washed with cold saturated aq. NaHCO₃ (100 mL) and water (100 mL). The organic layer was separated, dried over Na₂SO₄ and the solvent was removed under reduced pressure. The crude material was purified by flash chromatography (gradient elution: 0-3% MeOH in DCM in 10 CV) to afford the title product as light yellow oil (3.10 g, 88%, rf=0.25 (2% MeOH in DCM)). MS: calculated for C₂₀H₃₂N₄O₁₁, 504.21. Found 505.4. ¹H NMR (500 MHz, CDCl₃) δ 6.21-6.14 (m, 1H), 5.30 (dd, J=3.4, 1.1 Hz, 1H), 5.04 (dd, J=11.2, 3.4 Hz, 1H), 4.76 (d, J=8.6 Hz, 1H), 4.23-4.08 (m, 3H), 3.91-3.80 (m, 3H), 3.74-3.59 (m, 9H), 3.49-3.41 (m, 2H), 2.14 (s, 3H), 2.02 (s, 3H), 1.97 (d, J=4.2 Hz, 6H). ¹³C NMR (125 MHz, CDCl₃) δ 170.6 (C), 170.5 (C), 170.4 (C), 170.3 (C), 102.1 (CH), 71.6 (CH), 70.8 (CH), 70.6 (CH), 70.5 (CH), 70.3 (CH₂), 69.7 (CH₂), 68.5 (CH₂), 66.6 (CH₂), 61.5 (CH₂), 23.1 (CH₃), 20.7 (3×CH₃).

[chemical structure]

[1504] Preparation of compound 5: Compound 4 (1.00 g, 1.98 mmol, 1.0 eq.) was dissolved in a mixture of ethyl acetate (EtOAc) and MeOH (30 mL 1:1 v/v) and Pd/C (100 mg) was added. The reaction mixture was degassed using vacuum/argon cycles (3×) and hydrogenated under balloon pressure overnight. The reaction mixture was filtered through celite and washed with EtOAc (30 mL). The solvent was removed under reduced pressure to afford the title compound as colourless oil (0.95 g, quantitative yield, rf=0.25 (10% MeOH in DCM)). The compound was used without further purification. MS: calculated for C₂₀H₃₄N₂O₁₁, 478.2. Found 479.4.

[chemical structure]

[1505] Preparation of compound 7: Tris{[2-(tert-butoxycarbonyl)ethoxy]methyl}-methylamine 6 (3.37 g, 6.67 mmol, 1.0 eq.) was dissolved in a mixture of DCM/water (40 mL 1:1 v/v) and Na₂CO₃ (0.18 g, 1.7 mmol, 0.25 eq.) was added while stirring vigorously. Benzyl chloroformate (2.94 mL, 20.7 mmol, 3.10 eq.) was added dropwise to the previous mixture and the reaction was stirred at room temperature for 24 h. The reaction mixture was diluted with CH₂Cl₂ (100 mL) and washed with water (100 mL). The organic layer was separated and dried over Na₂SO₄. The solvent was removed under reduced pressure and the resulting crude material was purified by flash chromatography (gradient elution: 0-10% EtOAc in cyclohexane in 12 CV) to afford the title compound as pale yellowish oil (3.9 g, 91%, rf=0.56 (10% EtOAc in cyclohexane)). MS: calculated for C₃₃H₅₃NO₁₁, 639.3. Found 640.9. ¹H NMR (500 MHz, DMSO-d₆) δ 7.38-7.26 (m, 5H), 4.97 (s, 2H), 3.54 (t, 6H), 3.50 (s, 6H), 2.38 (t, 6H), 1.39 (s, 27H). ¹³C NMR (125 MHz, DMSO-d₆) δ 170.3 (3×C), 154.5 (C), 137.1 (C), 128.2 (2×CH), 127.7 (CH), 127.6 (2×CH), 79.7 (3×C), 68.4 (3×CH₂), 66.8 (3×CH₂), 64.9 (C), 58.7 (CH₂), 35.8 (3×CH₂), 27.7 (9×CH₃).

[chemical structure]

[1506] Preparation of compound 8: Cbz-NH-tris-Boc-ester 7 (0.20 g, 0.39 mmol, 1.0 eq.) was dissolved in CH₂Cl₂ (1 mL) under argon, trifluoroacetic acid (TFA, 1 mL) was added and the reaction was stirred at room temperature for 1 h. The solvent was removed under reduced pressure, the residue was co-evaporated 3 times with toluene (5 mL) and dried under high vacuum to get the compound as its TFA salt (0.183 g, 98%). The compound was used without further purification. MS: calculated for C₂₁H₂₉NO₁₁, 471.6. Found 472.4.

[chemical structure]

[1507] Preparation of compound 9: CbzNih-tris-OOH 8 (0.72 g, 1.49 mmol, 1.0 eq.) and GalNAc-PEG3-NiH₂ 5 (3.56 g, 7.44 mmol, 5.0 eq.) were dissolved in N,N-dimethylformamide (DMF) (25 mL). Then N,N,N′,N′-tetramethyl-O-(1H-benzotriazol-1-yl)uronium hexafluorophosphate (HBTU) (2.78 g, 7.44 mmol, 5.0 eq.), 1-hydroxybenzotriazole hydrate (HOBt) (1.05 g, 7.44 mmol, 5.0 eq.) and N,N-diisopropylethyl amine (DIPA) (2.07 mL, 11.9 mmol, 8.0 eq.) were added to the solution and the reaction was stirred for 72 h. The solvent was removed under reduced pressure, the residue was dissolved in DCM (100 mL) and washed with saturated aq. NaHCO₃ (100 mL). The organic layer was dried over Na₂SO₄, the solvent evaporated and the crude material was purified by flash chromatography (gradient elution: 0-5%0 MeOH in DCM in 14 CV). The product was obtained as pale yellowish oil (1.2 g, 43%, rf=0.20 (5% MeOH in DCM)). MS: calculated for C₈₁H₁₂₅N₇O₄₁, 1852.9. Found 1854.7. ¹H NMR (500 MHz, DMSO-d₆) δ 7.90-7.80 (in, 10H), 7.65-7.62 (m, 4H), 7.47-7.43 (m, 3H), 7.38-7.32 (m, 8H), 5.24-5.22 (m, 3H), 5.02-4.97 (m, 4H), 4.60-4.57 (m, 3H), 4.07-3.90 (m 10H), 3.67-3.36 (m, 70H), 3.23-3.07 (m, 25H), 2.18 (s, 10H), 2.00 (s, 13H), 1.89 (s, 11H), 1.80-1.78 (in, 17H). ¹³C NMR (125 MHz, DMSO-d₆) δ 170.1 (C), 169.8 (C), 169.7 (C), 169.4 (C), 169.2 (C), 169.1 (C), 142.7 (C), 126.3 (CH), 123.9 (CH), 118.7 (CH), 109.7 (CH), 100.8 (CH), 70.5 (CH), 69.8 (CH), 69.6 (CH), 69.5 (CH), 69.3 (CH₂), 69.0 (CH₂), 68.2 (CH₂), 67.2 (CH₂), 66.7 (CH₂), 61.4 (CH₂), 22.6 (CH₂), 22.4 (3×CH₃), 20.7 (9×CH₃).

[chemical structure]

[1508] Preparation of compound 10: Triantennary GalNAc compound 9 (0.27 g, 0.14 mmol, 1.0 eq.) was dissolved in MeOH (15 mL), 3 drops of acetic acid (AcOH) and Pd/C (30 mg) was added. The reaction mixture was degassed using vacuum/argon cycles (3×) and hydrogenated under balloon pressure overnight. The completion of the reaction was followed by mass spectrometry and the resulting mixture was filtered through a thin pad of celite. The solvent was evaporated and the residue obtained was dried under high vacuum and used for the next step without further purification. The product was obtained as pale yellowish oil (0.24 g, quantitative yield). MS: calculated for C₇₃H₁₁₉N₇O₃₉, 1718.8. Found 1719.3.

[chemical structure]

[1509] Preparation of compound 11: Commercially available suberic acid bis(N-hydroxysuccinimide ester) (3.67 g, 9.9 mmol, 1.0 eq.) was dissolved in DMF (5 mL) and triethylamine (1.2 mL) was added. To this solution was added dropwise a solution of 3-azido-1-propylamine (1.0 g, 9.9 mmol, 1.0 eq.) in DMF (5 mL). The reaction was stirred at room temperature for 3 h. The reaction mixture was diluted with EtOAc (100 mL) and washed with water (50 mL). The organic layer was separated, dried over Na₂SO₄ and the solvent was removed under reduced pressure. The crude material was purified by flash chromatography (gradient elution: 0-5% MeOH in DCM in 16 CV). The product was obtained as white solid (1.54 g, 43%, rf=0.71 (5% MeOH in DCM)). MS: calculated for C₁₅H₂₃N₅O₅, 353.4. Found 354.3.

[chemical structure]

[1510] Preparation of TriGalNAc (12): Triantennary GalNAc compound 10 (0.35 g, 0.24 mmol, 1.0 eq.) and compound 11 (0.11 g, 0.31 mmol, 1.5 eq.) were dissolved in DCM (5 mL) under argon and triethylamine (0.1 mL, 0.61 mmol, 3.0 eq.) was added. The reaction was stirred at room temperature overnight. The solvent was removed under reduced pressure, the residue was dissolved in EtOAc (100 mL) and washed with water (100 mL). The organic layer was separated and dried over Na₂SO₄. The solvent was evaporated and the resulting crude material was purified by flash chromatography (elution gradient: 0-10% MeOH in DCM in 20 CV) to afford the title compound as white fluffy solid (0.27 g, 67%, rf=0.5 (10% MeOH in DCM)). MS: calculated for C₈₄H₁₃₇N₁₁O₄₁, 1957.1. Found 1959.6.

Conjugation of Tether 1 to a siRNA Strand: Monofluoro Cyclooctyne (MFCO) Conjugation at 5′- or 3′-end

[chemical structure]

[1511] General conditions for MFCO conjugation: Amine-modified single strand was dissolved at 700 OD/mL in 50 mM carbonate/bicarbonate buffer pH 9.6/dimethyl sulfoxide (DMSO) 4:6 (v/v) and to this solution was added one molar equivalent of a 35 mM solution of MFCO-C6-NHS ester (Berry&Associates, Cat. #LK 4300) in DMF. The reaction was carried out at room temperature and after 1 h another molar equivalent of the MFCO solution was added. The reaction was allowed to proceed for an additional hour and was monitored by LC/MS. At least two molar equivalent excess of the MFCO NHS ester reagent relative to the amino modified oligonucleotide were needed to achieve quantitative consumption of the starting material. The reaction mixture was diluted 15-fold with water, filtered through a 1.2 μm filter from Sartorius and then purified by reserve phase (RP HPLC) on an Äkta Pure instrument (GE Healthcare).

[1512] Purification was performed using a XBridge C18 Prep 19×50 mm column from Waters. Buffer A was 100 mM TEAAc pH 7 and buffer B contained 95% acetonitrile in buffer A. A flow rate of 10 mL/min and a temperature of 60° C. were employed. UV traces at 280 nm were recorded. A gradient of 0-100% B within 60 column volumes was employed.

[1513] Fractions containing full length conjugated oligonucleotide were pooled, precipitated in the freezer with 3 M NaOAc, pH 5.2 and 85% ethanol and the collected pellet was dissolved in water. Samples were desalted by size exclusion chromatography and concentrated using a speed-vac concentrator to yield the conjugated oligonucleotide in an isolated yield of 40-80%.

[chemical structure]

[1514] General procedure for TriGalNAc conjugation: MFCO-modified single strand was dissolved at 2000 OD/mL in water and to this solution was added one equivalent solution of compound 12 (10 mM) in DMF. The reaction was carried out at room temperature and after 3 h 0.7 molar equivalent of the compound 12 solution was added. The reaction was allowed to proceed overnight and completion was monitored by LCMS. The conjugate was diluted 15-fold in water, filtered through a 1.2 μm filter from Sartorius and then purified by RP HPLC on an Äkta Pure instrument (GE Healthcare).

[1515] RP HPLC purification was performed using a XBridge C18 Prep 19×50 mm column from Waters. Buffer A was 100 mM triethylammonium acetate pH 7 and buffer B contained 95% acetonitrile in buffer A. A flow rate of 10 mL/min and a temperature of 60° C. were employed. UV traces at 280 nm were recorded. A gradient of 0-100% B within 60 column volumes was employed.

[1516] Fractions containing full-length conjugated oligonucleotide were pooled, precipitated in the freezer with 3 M NaOAc, pH 5.2 and 85% ethanol and the collected pellet was dissolved in water to give an oligonucleotide solution of about 1000 OD/mL. The O-acetates were removed by adding 20% aqueous ammonia. Quantitative removal of these protecting groups was verified by LC-MS.

[1517] The conjugates were desalted by size exclusion chromatography using Sephadex G25 Fine resin (GE Healthcare) on an Äkta Pure (GE Healthcare) instrument to yield the conjugated oligonucleotides in an isolated yield of 50-70%.

[1518] The following schemes further set out the routes of synthesis:

[chemical structure]

[chemical structure]

[chemical structure]

[chemical structure]

[chemical structure]

[chemical structure]

### Example 2: Duplex Annealing

[1519] To generate the desired siRNA duplex, the two complementary strands were annealed by combining equimolar aqueous solutions of both strands. The mixtures were placed into a water bath at 70° C. for 5 minutes and subsequently allowed to cool to ambient temperature within 2 h. The duplexes were lyophilized for 2 days and stored at −20° C.

[1520] The duplexes were analyzed by analytical SEC HPLC on Superdex™ 75 Increase 5/150 GL column 5×153-158 mm (Cytiva) on a Dionex Ultimate 3000 (Thermo Fisher Scientific) HPLC system. Mobile phase consisted of 1×PBS containing 10% acetonitrile. An isocratic gradient was run in 10 min at a flow rate of 1.5 mL/min at room temperature. UV traces at 260 and 280 nm were recorded. Water (LC-MS grade) was purchased from Sigma-Aldrich and Phosphate-buffered saline (PBS; 10×, pH 7.4) was purchased from GIBCO (Thermo Fisher Scientific).

### Example 3: Synthesis of Tether 2

### General Experimental Conditions:

[1521] Thin layer chromatography (TLC) was performed on silica-coated aluminium plates with fluorescence indicator 254 nm from Macherey-Nagel. Compounds were visualized under UV light (254 nm), or after spraying with the 5% H₂SO₄ in methanol (MeOH) or ninhydrin reagent according to Stahl (from Sigma-Aldrich), followed by heating. Flash chromatography was performed with a Biotage Isolera One flash chromatography instrument equipped with a dual variable UV wavelength detector (200-400 nm) using Biotage Sfar Silica 10, 25, 50 or 100 g columns (Uppsala, Sweden).

[1522] All moisture-sensitive reactions were carried out under anhydrous conditions using dry glassware, anhydrous solvents, and argon atmosphere. All commercially available reagents were purchased from Sigma-Aldrich and solvents from Carl Roth GmbH+Co. KG. D-Galactosamine pentaacetate was purchased from AK scientific.

[1523] HPLC/ESI-MS was performed on a Dionex UltiMate 3000 RS UHPLC system and Thermo Scientific MSQ Plus Mass spectrometer using an Acquity UPLC Protein BEH C4 column from Waters (300 Å, 1.7 μm, 2.1×100 mm) at 60° C. The solvent system consisted of solvent A with H₂O containing 0.1% formic acid and solvent B with acetonitrile (ACN) containing 0.1% formic acid. A gradient from 5-100% of B over 15 min with a flow rate of 0.4 mL/min was employed. Detector and conditions: Corona ultra-charged aerosol detection (from esa). Nebulizer Temp.: 25° C. N₂ pressure: 35.1 psi. Filter: Corona.

[1524] ¹H and ¹³C NMR spectra were recorded at room temperature on a Varian spectrometer at 500 MHz (¹H NMR) and 125 MHz (¹³C NMR). Chemical shifts are given in ppm referenced to the solvent residual peak (CDCl₃—¹H NMR: 6 at 7.26 ppm and ¹³C NMR 6 at 77.2 ppm; DMSO-d₆—¹H NMR: 6 at 2.50 ppm and ¹³C NMR 6 at 39.5 ppm). Coupling constants are given in Hertz. Signal splitting patterns are described as singlet (s), doublet (d), triplet (t) or multiplet (m).

### Synthesis Route for the Conjugate Building Block TriGalNAc_Tether2:

[chemical structure]

[1525] Preparation of compound 2: D-Galactosamine pentaacetate (3.00 g, 7.71 mmol, 1.0 eq.) was dissolved in anhydrous dichloromethane (DCM) (30 mL) under argon and trimethylsilyl trifluoromethanesulfonate (TMSOTf, 4.28 g, 19.27 mmol, 2.5 eq.) was added. The reaction was stirred at room temperature for 3 h. The reaction mixture was diluted with DCM (50 mL) and washed with cold saturated aq. NaHCO₃ (100 mL) and water (100 mL). The organic layer was separated, dried over Na₂SO₄, and concentrated to afford the title compound as yellow oil, which was purified by flash chromatography (gradient elution: 0-10% MeOH in DCM in 10 CV). The product was obtained as colourless oil (2.5 g, 98%, rf=0.45 (2% MeOH in DCM)).

[chemical structure]

[1526] Preparation of compound 4: Compound 2 (2.30 g, 6.98 mmol, 1.0 eq.) and azido-PEG3-OH (1.83 g, 10.5 mmol, 1.5 eq.) were dissolved in anhydrous DCM (40 mL) under argon and molecular sieves 3 Å (5 g) were added to the solution. The mixture was stirred at room temperature for 1 h. TMSOTf (0.77 g, 3.49 mmol, 0.5 eq.) was then added to the mixture and the reaction was stirred overnight. The molecular sieves were filtered, the filtrate was diluted with DCM (100 mL) and washed with cold saturated aq. NaHCO₃ (100 mL) and water (100 mL). The organic layer was separated, dried over Na₂SO₄ and the solvent was removed under reduced pressure. The crude material was purified by flash chromatography (gradient elution: 0-3% MeOH in DCM in 10 CV) to afford the title product as light-yellow oil (3.10 g, 88%, rf=0.25 (2% MeOH in DCM)). MS: calculated for C₂₀H₃₂N₄O₁₁, 504.21. Found 505.4. ¹H NMR (500 MHz, CDCl₃) δ 6.21-6.14 (m, 1H), 5.30 (dd, J=3.4, 1.1 Hz, 1H), 5.04 (dd, J=11.2, 3.4 Hz, 1H), 4.76 (d, J=8.6 Hz, 1H), 4.23-4.08 (m, 3H), 3.91-3.80 (m, 3H), 3.74-3.59 (m, 9H), 3.49-3.41 (m, 2H), 2.14 (s, 3H), 2.02 (s, 3H), 1.97 (d, J=4.2 Hz, 6H). ¹³C NMR (125 MHz, CDCl₃) δ 170.6 (C), 170.5 (C), 170.4 (C), 170.3 (C), 102.1 (CH), 71.6 (CH), 70.8 (CH), 70.6 (CH), 70.5 (CH), 70.3 (CH₂), 69.7 (CH₂), 68.5 (CH₂), 66.6 (CH₂), 61.5 (CH₂), 23.1 (CH₃), 20.7 (3×CH₃).

[chemical structure]

[1527] Preparation of compound 5: Compound 4 (1.00 g, 1.98 mmol, 1.0 eq.) was dissolved in a mixture of ethyl acetate (EtOAc) and MeOH (30 mL 1:1 v/v) and Pd/C (100 mg) was added. The reaction mixture was degassed using vacuum/argon cycles (3×) and hydrogenated under balloon pressure overnight. The reaction mixture was filtered through celite and washed with EtOAc (30 mL). The solvent was removed under reduced pressure to afford the title compound as colourless oil (0.95 g, quantitative yield, rf=0.25 (10% MeOH in DCM)). The compound was used without further purification. MS: calculated for C₂₀H₃₄N₂O₁₁, 478.2. Found 479.4.

[chemical structure]

[1528] Preparation of compound 7: Tris{[2-(tert-butoxycarbonyl)ethoxy]methyl}-methylamine 6 (3.37 g, 6.67 mmol, 1.0 eq.) was dissolved in a mixture of DCM/water (40 mL 1:1 v/v) and Na₂CO₃ (0.18 g, 1.7 mmol, 0.25 eq.) was added while stirring vigorously. Benzyl chloroformate (2.94 mL, 20.7 mmol, 3.10 eq.) was added dropwise to the previous mixture and the reaction was stirred at room temperature for 24 h. The reaction mixture was diluted with CH₂Cl₂ (100 mL) and washed with water (100 mL). The organic layer was separated and dried over Na₂SO₄. The solvent was removed under reduced pressure and the resulting crude material was purified by flash chromatography (gradient elution: 0-10% EtOAc in cyclohexane in 12 CV) to afford the title compound as pale yellowish oil (3.9 g, 91%, rf=0.56 (10% EtOAc in cyclohexane)). MS: calculated for C₃₃H₅₃NO₁₁, 639.3. Found 640.9. ¹H NMR (500 MHz, DMSO-d₆) δ 7.38-7.26 (m, 5H), 4.97 (s, 2H), 3.54 (t, 6H), 3.50 (s, 6H), 2.38 (t, 6H), 1.39 (s, 27H). ¹³C NMR (125 MHz, DMSO-d₆) δ 170.3 (3×C), 154.5 (C), 137.1 (C), 128.2 (2×CH), 127.7 (CH), 127.6 (2×CH), 79.7 (3×C), 68.4 (3×CH₂), 66.8 (3×CH₂), 64.9 (C), 58.7 (CH₂), 35.8 (3×CH₂), 27.7 (9×CH₃).

[chemical structure]

[1529] Preparation of compound 8: Cbz-NH-tris-Boc-ester 7 (0.20 g, 0.39 mmol, 1.0 eq.) was dissolved in CH₂Cl₂ (1 mL) under argon, trifluoroacetic acid (TFA, 1 mL) was added and the reaction was stirred at room temperature for 1 h. The solvent was removed under reduced pressure, the residue was co-evaporated 3 times with toluene (5 mL) and dried under high vacuum to get the compound as its TFA salt (0.183 g, 98%). The compound was used without further purification. MS: calculated for C₂₁H₂₉NO₁₁, 471.6. Found 472.4.

[chemical structure]

[1530] Preparation of compound 9: CbzNH-tris-COOH 8 (0.72 g, 1.49 mmol, 1.0 eq.) and GalNAc-PEG3-NH₂ 5 (3.56 g, 7.44 mmol, 5.0 eq.) were dissolved in N,N-dimethylformamide (DMF) (25 mL). Then N,N,N′,N′-tetramethyl-O-(1H-benzotriazol-1-yl)uronium hexafluorophosphate (HBTU) (2.78 g, 7.44 mmol, 5.0 eq.), 1-hydroxybenzotriazole hydrate (HOBt) (1.05 g, 7.44 mmol, 5.0 eq.) and N,N-diisopropylethylamine (DIPEA) (2.07 mL, 11.9 mmol, 8.0 eq.) were added to the solution and the reaction was stirred for 72 h. The solvent was removed under reduced pressure, the residue was dissolved in DCM (100 mL) and washed with saturated aq. NaHCO₃ (100 mL). The organic layer was dried over Na₂SO₄, the solvent evaporated and the crude material was purified by flash chromatography (gradient elution: 0-5% MeOH in DCM in 14 CV). The product was obtained as pale yellowish oil (1.2 g, 43%, rf=0.20 (5% MeOH in DCM)). MS: calculated for C₈₁H₁₂₅N₇O₄₁, 1852.9. Found 1854.7. ¹H NMR (500 MHz, DMSO-d₆) δ 7.90-7.80 (m, 10H), 7.65-7.62 (m, 4H), 7.47-7.43 (m, 3H), 7.38-7.32 (m, 8H), 5.24-5.22 (m, 3H), 5.02-4.97 (m, 4H), 4.60-4.57 (m, 3H), 4.07-3.90 (m 10H), 3.67-3.36 (m, 70H), 3.23-3.07 (m, 25H), 2.18 (s, 10H), 2.00 (s, 13H), 1.89 (s, 11H), 1.80-1.78 (m, 17H). ¹³C NMR (125 MHz, DMSO-d₆) δ 170.1 (C), 169.8 (C), 169.7 (C), 169.4 (C), 169.2 (C), 169.1 (C), 142.7 (C), 126.3 (CH), 123.9 (CH), 118.7 (CH), 109.7 (CH), 100.8 (CH), 70.5 (CH), 69.8 (CH), 69.6 (CH), 69.5 (CH), 69.3 (CH₂), 69.0 (CH₂), 68.2 (CH₂), 67.2 (CH₂), 66.7 (CH₂), 61.4 (CH₂), 22.6 (CH₂), 22.4 (3×CH₃), 20.7 (9×CH₃).

[chemical structure]

[1531] Preparation of compound 10: Triantennary GalNAc compound 9 (0.27 g, 0.14 mmol, 1.0 eq.) was dissolved in MeOH (15 mL), 3 drops of acetic acid (AcOH) and Pd/C (30 mg) was added. The reaction mixture was degassed using vacuum/argon cycles (3×) and hydrogenated under balloon pressure overnight. The completion of the reaction was followed by mass spectrometry and the resulting mixture was filtered through a thin pad of celite. The solvent was evaporated, and the residue obtained was dried under high vacuum and used for the next step without further purification. The product was obtained as pale yellowish oil (0.24 g, quantitative yield). MS: calculated for C₇₃H₁₁₉N₇O₃₉, 1718.8. Found 1719.3.

[chemical structure]

[1532] Preparation of compound 14: Triantennary GalNAc compound 10 (0.45 g, 0.26 mmol, 1.0 eq.), HBTU (0.19 g, 0.53 mmol, 2.0 eq.) and DIPEA (0.23 mL, 1.3 mmol, 5.0 eq.) were dissolved in DCM (10 mL) under argon. To this mixture, it was added dropwise a solution of compound 13 (0.14 g, 0.53 mmol, 2.0 eq.) in DCM (5 mL). The reaction was stirred at room temperature overnight. The solvent was removed, and the residue was dissolved in EtOAc (50 mL), washed with water (50 mL) and dried over Na₂SO₄. The solvent was evaporated, and the crude material was purified by flash chromatography (gradient elution: 0-5% MeOH in DCM in 20 CV). The product was obtained as white fluffy solid (0.25 g, 48%, rf=0.4 (10% MeOH in DCM)). MS: calculated for C₈₈H₁₃₇N₇O₄₂, 1965.1. Found 1965.6.

[chemical structure]

[1533] Preparation of TriGalNAc (15): Triantennary GalNAc compound 14 (0.31 g, 0.15 mmol, 1.0 eq.) was dissolved in EtOAc (15 mL) and Pd/C (40 mg) was added. The reaction mixture was degassed by using vacuum/argon cycles (3×) and hydrogenated under balloon pressure overnight. The completion of the reaction was monitored by mass spectrometry and the resulting mixture was filtered through a thin pad of celite. The solvent was removed under reduced pressure and the resulting residue was dried under high vacuum overnight. The residue was used for conjugations to oligonucleosides without further purification (0.28 g, quantitative yield). MS: calculated for C₈₁H₁₃₁N₇O₄₂, 1874.9. Found 1875.3.

Conjugation of Tether 2 to a siRNA Strand: TriGalNAc Tether 2 (GalNAc-T2) Conjugation at 5′-End or 3′-End

[chemical structure]

[1534] Preparation of TriGalNAc tether 2 NHS ester: To a solution of carboxylic acid tether 2 (compound 15, 227 mg, 121 μmol) in DMF (2.1 mL), N-hydroxysuccinimide (NHS) (15.3 mg, 133 μmol) and N,N′-diisopropylcarbodiimide (DIC) (19.7 μL, 127 μmol) were added. The solution was stirred at room temperature for 18 h and used without purification for the subsequent conjugation reactions.

[1535] General procedure for triGalNAc tether 2 conjugation: Amine-modified single strand was dissolved at 700 OD/mL in 50 mM carbonate/bicarbonate buffer pH 9.6/DMSO 4:6 (v/v) and to this solution was added one molar equivalent of Tether 2 NHS ester (57 mM) solution in DMF. The reaction was carried out at room temperature and after 1 h another molar equivalent of the NHS ester solution was added. The reaction was allowed to proceed for one more hour and reaction progress was monitored by LCMS. At least two molar equivalent excess of the NHS ester reagent relative to the amino modified oligonucleoside were needed to achieve quantitative consumption of the starting material. The reaction mixture was diluted 15-fold with water, filtered once through 1.2 μm filter from Sartorius and then purified by reserve phase (RP HPLC) on an Äkta Pure (GE Healthcare) instrument.

[1536] The purification was performed using a XBridge C18 Prep 19×50 mm column from Waters. Buffer A was 100 mM TEAA pH 7 and buffer B contained 95% acetonitrile in buffer A. A flow rate of 10 mL/min and a temperature of 60° C. were employed. UV traces at 280 nm were recorded. A gradient of 0-100% B within 60 column volumes was employed.

[1537] Fractions containing full-length conjugated oligonucleosides were pooled together, precipitated in the freezer with 3 M NaOAc, pH 5.2 and 85% ethanol and then dissolved at 1000 OD/mL in water. The 0-acetates were removed with 20% ammonium hydroxide in water until completion (monitored by LC-MS).

[1538] The conjugates were desalted by size exclusion chromatography using Sephadex G25 Fine resin (GE Healthcare) on an Äkta Pure (GE Healthcare) instrument to yield the conjugated oligonucleotides in an isolated yield of 60-80%.

[1539] The conjugates were characterized by HPLC-MS analysis with a 2.1×50 mm XBridge C18 column (Waters) on a Dionex Ultimate 3000 (Thermo Fisher Scientific) HPLC system equipped with a Compact ESI-Qq-TOF mass spectrometer (Bruker Daltonics). Buffer A was 16.3 mM triethylamine, 100 mM HFIP in 1% MeOH in H2O and buffer B contained 95% MeOH in buffer A. A flow rate of 250 μL/min and a temperature of 60° C. were employed. UV traces at 260 and 280 nm were recorded. A gradient of 1-100% B within 31 min was employed.

[1540] The following schemes further set out the routes of synthesis:

[chemical structure]

[chemical structure]

[chemical structure]

[chemical structure]

[chemical structure]

### Example 4: Duplex Annealing

[1541] To generate the desired siRNA duplex, the two complementary strands were annealed by combining equimolar aqueous solutions of both strands. The mixtures were placed into a water bath at 70° C. for 5 minutes and subsequently allowed to cool to ambient temperature within 2 h. The duplexes were lyophilized for 2 days and stored at −20° C.

[1542] The duplexes were analyzed by analytical SEC HPLC on Superdex™ 75 Increase 5/150 GL column 5×153-158 mm (Cytiva) on a Dionex Ultimate 3000 (Thermo Fisher Scientific) HPLC system. Mobile phase consisted of 1×PBS containing 10% acetonitrile. An isocratic gradient was run in 10 min at a flow rate of 1.5 mL/min at room temperature. UV traces at 260 and 280 nm were recorded. Water (LC-MS grade) was purchased from Sigma-Aldrich and Phosphate-buffered saline (PBS; 10×, pH 7.4) was purchased from GIBCO (Thermo Fisher Scientific).

### Example 5: Alternative Synthesis Route for the Conjugate Building Block TriGalNAc Tether2

[chemical structure]

[chemical structure]

[chemical structure]

[chemical structure]

Conjugation of Tether 2 to a siRNA Strand: TriGalNAc Tether 2 (GalNAc-T2) Conjugation at 5′-End or 3′-End

### Conjugation Conditions

[chemical structure]

[1543] Pre-activation: To a solution of compound 15 (16 umol, 4 eq.) in DMIF (160 μL) was added TFA-O-PFP (15 μl, 21 eq.) followed by DIPEA (23 μl, 32 eq.) at 25° C. The tube was shaken for 2 h at 25° C. The reaction was quenched with H₂O (10 μL).

[1544] Coupling: The resulting mixture was diluted with DMIF (400 μl), followed by addition of oligo-amine solution (4.0 mol in 10×PBS, pH 7.4, 500 μL; final oligo concentration in organic and aqueous solution: 4 μmol/ml=4 mM). The tube was shaken at 25° C. for 16 h and the reaction was analysed by LCMS. The resulting mixture was treated with 28% NH₄OH (4.5 ml) and shaken for 2 h at 25° C. The mixture was analysed by LCMS, concentrated, and purified by IP-RP HPLC to produce the oligonucleotides conjugated to tether 2 GalNAc.

[chemical structure]

### Example 6: Solid Phase Synthesis Method: Scale ≤1 μMol

[1545] Syntheses of siRNA sense and antisense strands were performed on a MerMade192X synthesiser with commercially available solid supports made of controlled pore glass with universal linker (Universal CPG, with a loading of 40 mol/g; LGC Biosearch or Glen Research).

[1546] RNA phosphoramidites were purchased from ChemGenes or Hongene.

[1547] The 2′-O-Methyl phosphoramidites used were the following: 5′-(4,4′-dimethoxytrityl)-N-benzoyl-adenosine 2′-O-methyl-3′-[(2-cyanoethyl)-(N,N-diisopropyl)]-phosphoramidite, 5′-(4,4′-dimethoxytrityl)-N-acetyl-cytidine 2′-O-methyl-3′-[(2-cyanoethyl)-(N,N-diisopropyl)]-phosphoramidite, 5′-(4,4′-dimethoxytrityl)-N-isobutyryl-guanosine 2′-O-methyl-3′-[(2-cyanoethyl)-(N,N-diisopropyl)]-phosphoramidite, 5′-(4,4′-dimethoxytrityl)-uridine 2′-O-methyl-3′-[(2-cyanoethyl)-(N,N-diisopropyl)]-phosphoramidite.

[1548] The 2′-F phosphoramidites used were the following: 5′-dimethoxytrityl-N-benzoyl-deoxyadenosine 2′-fluoro-3′-[(2-cyanoethyl)-(N,N-diisopropyl)]-phosphoramidite, 5′-dimethoxytrityl-N-acetyl-deoxycytidine 2′-fluoro-3′-[(2-cyanoethyl)-(N,N-diisopropyl)]-phosphoramidite, 5′-dimethoxytrityl-N-isobutyryl-deoxyguanosine 2′-fluoro-3′-[(2-cyanoethyl)-(N,N-diisopropyl)]-phosphoramidite and 5′-dimethoxytrityl-deoxyuridine 2′-fluoro-3′-[(2-cyanoethyl)-(N,N-diisopropyl)]-phosphoramidite.

[1549] All phosphoramidites were dissolved in anhydrous acetonitrile (Honeywell Research Chemicals) at a concentration of 0.05M, except 2′-O-methyl-uridine phosphoramidite which was dissolved in DMF/MeCN (1:4, v/v). Iodine at 0.02M in acetonitrile/Pyridine/H2O (DNAchem) was used as oxidizing reagent. Thiolation for phosphorothioate linkages was performed with 0.2 M PADS (TCI) in acetonitrile/pyridine 1:1 v/v. 5-Ethyl thiotetrazole (ETT), 0.25M mM in acetonitrile was used as activator solution.

[1550] Inverted abasic phosphoramidite, 3-O-Dimethoxytrityl-2-deoxyribose-5-[(2-cyanoethyl)-(N, N-diisopropyl)]-phosphoramidite were purchased from Chemgenes (ANP-1422) or Hongene (OP-040).

[1551] At each cycle, the DMT was removed by deblock solution, 3% TCA in DCM (DNAchem).

[1552] The coupling time was 180 seconds. The oxidizer contact time was set to 80 seconds and thiolation time was 2*100 seconds.

[1553] At the end of the synthesis, the oligonucleotides were cleaved from the solid support using a NH₄OH:EtOH solution 4:1 (v/v) for 20 hours at 45° C. (TCI). The solid support was then filtered off, the filter was thoroughly washed with H₂O and the volume of the combined solution was reduced by evaporation under reduced pressure.

[1554] Oligonucleotide were treated to form the sodium salt by ultracentrifugation using Amicon Ultra-2 Centrifugal Filter Unit; PBS buffer (10×, Teknova, pH 7.4, Sterile) or by EtOH precipitation from 1M sodium acetate.

[1555] The single strands identity were assessed by MS ESI- and then, were annealed in water to form the final duplex siRNA and duplex purity were assessed by size exclusion chromatography.

### Example 7: Solid Phase Synthesis Method: Scale ≥5 μMol

[1556] Syntheses of siRNA sense and antisense strands were performed on a MerMadel2 synthesiser with commercially available solid supports made of controlled pore glass with universal linker (Universal CPG, with a loading of 40 mol/g; LGC Biosearch or Glen Research) at 5 μmol scale. Sense strand destined to 3′ conjugation were synthesised at 12 μmol on 3′-PT-Amino-Modifier C6 CPG 500 Å solid support with a loading of 86 μmol/g (LGC).

[1557] RNA phosphoramidites were purchased from ChemGenes or Hongene.

[1558] The 2′-O-Methyl phosphoramidites used were the following: 5′-(4,4′-dimethoxytrityl)-N-benzoyl-adenosine 2′-O-methyl-3′-[(2-cyanoethyl)-(N,N-diisopropyl)]-phosphoramidite, 5′-(4,4′-dimethoxytrityl)-N-acetyl-cytidine 2′-O-methyl-3′-[(2-cyanoethyl)-(N,N-diisopropyl)]-phosphoramidite, 5′-(4,4′-dimethoxytrityl)-N-isobutyryl-guanosine 2′-O-methyl-3′-[(2-cyanoethyl)-(N,N-diisopropyl)]-phosphoramidite, 5′-(4,4′-dimethoxytrityl)-uridine 2′-O-methyl-3′-[(2-cyanoethyl)-(N,N-diisopropyl)]-phosphoramidite.

[1559] The 2′-F phosphoramidites used were the following: 5′-dimethoxytrityl-N-benzoyl-deoxyadenosine 2′-fluoro-3′-[(2-cyanoethyl)-(N,N-diisopropyl)]-phosphoramidite, 5′-dimethoxytrityl-N-acetyl-deoxycytidine 2′-fluoro-3′-[(2-cyanoethyl)-(N,N-diisopropyl)]-phosphoramidite, 5′-dimethoxytrityl-N-isobutyryl-deoxyguanosine 2′-fluoro-3′-[(2-cyanoethyl)-(N,N-diisopropyl)]-phosphoramidite and 5′-dimethoxytrityl-deoxyuridine 2′-fluoro-3′-[(2-cyanoethyl)-(N,N-diisopropyl)]-phosphoramidite.

[1560] Inverted abasic phosphoramidite, 3-O-Dimethoxytrityl-2-deoxyribose-5-[(2-cyanoethyl)-(N, N-diisopropyl)]-phosphoramidite were purchased from Chemgenes (ANP-1422) or Hongene (OP-040).

[1561] All phosphoramidites were dissolved in anhydrous acetonitrile (Honeywell Research Chemicals) at a concentration of 0.05M, except 2′-O-methyl-uridine phosphoramidite which was dissolved in DMF/MeCN (1:4, v/v). Iodine at 0.02M in acetonitrile/Pyridine/H₂O (DNAchem) was used as oxidizing reagent. Thiolation for phosphorothioate linkages was performed with 0.2 M PADS (TCI) in acetonitrile/pyridine 1:1 v/v. 5-Ethyl thiotetrazole (ETT), 0.25M mM in acetonitrile was used as activator solution.

[1562] At each cycle, the DMT was removed by deblock solution, 3% TCA in DCM (DNAchem).

[1563] For strands synthesised on universal CPG the coupling was performed with 8 eq. of amidite for 130 seconds. The oxidation time was 47 seconds, the thiolation time was 210 seconds.

[1564] For strands synthesised on 3′-PT-Amino-Modifier C6 CPG the coupling was performed with 8 eq. of amidite for 2*150 seconds. The oxidation time was 47 seconds, the thiolation time was 250 seconds

[1565] At the end of the synthesis, the oligonucleotides were cleaved from the solid support using a NH₄OH:EtOH solution 4:1 (v/v) for 20 hours at 45° C. (TCI). The solid support was then filtered off, the filter was thoroughly washed with H₂O and the volume of the combined solution was reduced by evaporation under reduced pressure.

[1566] Oligonucleotide were treated to form the sodium salt by EtOH precipitation from 1M sodium acetate.

[1567] The single strand oligonucleotides were purified by IP-RP HPLC on Xbridge BEH C18 5 μm, 130 Å, 19×150 mm (Waters) column with an increasing gradient of B in A. Mobile phase A: 240 mM HFIP, 7 mM TEA and 5% methanol in water; mobile phase B: 240 mM HFIP, 7 mM TEA in methanol.

[1568] The single strands purity and identity were assessed by UPLC/MS ESI- on Xbridge BEH C18 2.5 μm, 3×50 mm (Waters) column with an increasing gradient of B in A. Mobile phase A: 100 mM HFIP, 5 mM TEA in water; mobile phase B: 20% mobile phase A: 80% Acetonitrile (v/v).

[1569] Sense strand were conjugated as per protocols provided in any of examples 1, 3 or 5.

[1570] Sense and Antisense strands were then annealed in water to form the final duplex siRNA and duplex purity were assessed by size exclusion chromatography.

### Example 8: Nucleic Acid Sequences

[1571] siRNA oligonucleosides suitable for use according to the present invention can target HCII and ZPI. The full DNA sequences of the HCII and ZPI targets are respectively as follows (SEQ ID NOs: 1 and 2):

(HCII)
SEQ ID NO: 1
TTGCGCTTCTAGAATGCTTCCCTCTCAATGAGAACAGTAGCTCCACGTGGCTGGGAAGTTCAAAGTGG
TTTTGACACAGAAAAGAGGAAGTAAGTGGACTCTATCTTTGATTTGGGATCCTACTCCTGACCCTGTG
AACTTCTTGGCTCCCTCTTGAGGACGTTGGCTTGAAAGTGGCTCTGTGGGTTCTCCCTGCTCTCTGACTT
CTCCGAGCCTGCTGGCCACTGTCTTGGCTGAGACTGCTCTAGTCTCCAGAAAGGAGATCTGCTCACTCC
TAAGAAGTATCAAGGTCAGGCCAGGTGTGGTGGCTCACGCCTGTAATCCCAGCACTTTGGGAGGCCAA
GACAGGCAGATCAGGAGGTCAGGAGATCGAGATCAGCCTGGCTAACACGGTAAAACCCCATCTCTAC
TAAAAATACAAAAAATTAGCCAGGCGTGGTGGCACACACCTGTAGTCCCAGGTACTCGGGAGGCTGA
AGCAGGAGAATCGCTTGAAACCAGGAGGCCGAGGTTGCAGTGAGCCAAGATTGCGCCACTGCACTGC
AGCCTGGGCGACAGAGCGAGACGCCATTTCAAAAAAAAAAAAAAATCAAGGTCAGGGGGGAAGTGG
GAAGACTGAAATAGATAAAGGATTCTAAAGAGATATAACAGTCAAATGCGACACATGAAACCCTGAC
CAGATAAAAATTAAAAACCCATAAAATACATGTTTGAAGTCATAGAGTAATCTGACTTGGACTAGACA
TGTGATATATGTGAGGCTTGTGATCTTCCCAGGAGTGATGGTAGCACAGCACAGGGCAGAGACCCGTC
CATGGAAGAAACACTGGTGCTAGTGCCCAGGGCAGAAGTGAGTGATGTCTTTAAGTGGATATGGAAA
AATATTAACTATTCTACCTAGGTTGTGGGTGTATGGATATTTAGTATTCAATTATTCCAATTTCTCTGTG
TATGTATACATATTTTTTTTAGAGACAGGGTCTCACTCTGTCGACCACACTGGAGTAGGGGGTACAATC
ATAGCTCACTGTACATACTCAAGTGATCCTTCTGCCTCAGCCTCCTGAGCAGATGGGACTACAGGTGT
GCAGCATCATGGCCCAGTTTTTTTTTTTTTGGTAGAGATGGGTTTTGCTAGCCGGGAGCAGTGGCTCAT
GCCTGTAATCCTAGCACTTTGGGAGGCTGAGGCGGGCAGATCATCTGAGGTCAGGAGTTCAAGACCAG
CCTGGGCAACATGGTAAAACCCTGTCTCTACTAAAAACACAAAAATTAGCCAGGCATGATGGCAGGC
GCCTGTAATCCCAGCTACTTGGGAGGCTGAGGCAGGAGAATCGCTTGAACCCAGGAGGCAGAGGTTG
CAGCAAGCTAAGATTGAGCCACTGCACTCCAGCCTGGGCAACAGAGCAAAAACTCCGTCTCAAAAAA
AAAAAAAAAAAAAGAGAGAGAGAGAGATCGGTTTTGCTATGTTGCCCAAGCTGGACACGGACACACA
CACACACACACACACACACACACACACACACACACACACACACACAAGCTGGACACAGAGACACACA
CAGTGACAGGGCAAAGGTTCCAAAATTTTAAACCTGGTAAATCTGGGTACGGGTATACAGGAGTTGTT
CTACTACACTATTCTTTCAACTTTTTTGAAAGTTTGAAGTTATTTCAAAAGAAAAAGTTTTCCAAACTTT
AGTGATCCTCCTGCCTCAGCCTCCCAAAGTGCTGGGATGATAGGCATGAGCCACCGTGCCTGACCCCT
CTGTATATTTTTAGAATTTCATGTTAAAAGATGGAAAAGTCTGGATGAGGTAGTTCACGCCTGTCTTCC
CAGCTCTTTGGGAGGCCAAGGTGGGAAGACTGCTTGAAGCCAGACGTTCAAGACCAACTTGGCCAAC
ATAGTGAGACCCCGCTTTTTTCTAACTAAAAAAATTTTTTTCCAAGTTGGAAAAAATATCTAGCCATAA
GACAAACCTTGAAACTGCAAAAGAACAATGGAGTATGTGTGACAGGAGGTACTGCTCTACAGTGGGG
TTAAAGCCATACACAAGCTGTGGTGGCTCACGCCTGTAATCCCAGCACTTTGGGAGGCCGATGCGGGC
GGATCATGAGGTTAGGAGTTCAAGACCAGCCTGGCCAGCATGGTGAAACCCGTCTCTACTAAAAATAC
AAAACATTAGCCAGACGTGGTGGTGGGCACCTGTAGTCCCAGCTACTAGGGAGGCTGAGGCAGGAGA
ATGGCGTGAACCCAGGAGGCGGAGCTTGCAGTGAGCTGAGATTGCGCCACTGCACTCCAGCCTGGGC
GACAGAGCGAGACTCTGTCTCAAAAAAAAAAAAGCCATACACAAGCTGTTACCACTAAATGGGAAAA
TGACTGAAAAATGTCAATGTCAAGAGGGACTGAAATCAAATTTTTCCAATAGTGGGTTACATGATCAG
AAATCCAAATAGACAGGAAATATGTTGGCTTTATTTATTTATTTATTTATTTATTTATTTATTTAGACAG
AGTCTCACTCTGTCACCCAGGCTGGAGTACAGTGGCATGAACTCGGCTCACTGCAACCTTCACCTCCC
AGGTTCAAGCGATTGTCCTGCCTCAGCCTCCCGAGTAGCTGGGACTACAGATGTGTGCCACCACACCC
AGCTAATTTTTGTATTTTTAGTAGGGACGGGGTTTTACCATGTTGGTCAGGCTGGTCTTGAACTCCTGA
CCTCAAGTGATCCACCCGCCTTGGCCTCTCAAAGTGCTGGGATTACAGGTGTGAGCCACCACACCTGG
CCGGTACTGGCTTTAAAAATAACAAAAGTAATACATACACATAGAAAAAGGTCAAACAAAGAAGTAC
ATAGAATGAAAAATGAATGCTGTGTCCCCTCCCAGACCATTTCTGTGAATAAATATGTAATACCATGA
AATGATGAGGACTAACATTTTCTGAATGCCAGGCACCACTCTATGTGCTTTCCACACATTCATTAACCT
CATTTAATTTTCTCATTTAATTAATGAGATAAATTAATGTATCTCATTTAATTTTCACAACAACCTCATG
CAGTAGGTGTAACTGTCACCCTCATTTCAGAGAGCAGAATACTGAGAGCTGGAGGCCAAGGGGCAAT
TTCAGCCAGGGTGGCTGGTGACGCCTCGGTGAAACCAAGAGCGAACAGTGAGAGCAGCGGCCACCTG
CTGGTCTGCAGGGATGGTGTCCTGGGCAGAAAGAATAGCAAGTGCCAGGGCTGTGCTGGGGCCGGGC
TTTGCATGTGTGAGAACAAGACAGAGAATGAGGGAGGTGGGCCCACGAGGAGTGTGGGCACAGACAG
CAGCCTCTGCCTGTGGTGCCACGCTGAAGACTCAGTATTGTATGTGACAGATGAAGGCTCTAAGAAGA
CAGCTCTGACAAAAGCTAGAGTGCAAAATCAGACTCAGACACAACCACCGGTCTGTGTCCTGAACAC
AATGGACCTTTACACTCTGGAATTTCTCAAACGGAGCAATGCACAGACACCCCCATGGGCCCCTTGCA
CACCCGCAGATTCTCCTAGGAGTCACATTCTCTCTTCAGATAGACTCTGGGTGCCGACACTCCCAAACA
TGCTCTTGAGGAGCAGTCTCTGTGATAAGCTGATCTTCCAGACAATCCAGAATATTCTTAAAACTTTTT
AGATCATAAAATTTAAAACACAAATTAAAAAACAAATTATCATAAGGCCGGGCACAGTGACTCATGC
CTGTAATCCCAGCACTTTGCAAGGCTGAAGCAGGAGGATCACTTGAGCCCAAGAGTTCAAGACCAGCC
TAGGCAACATAGTGAGACCCTGTCTCTACAAAAAAGTCAAAAGTTAGCTAGACATGGTGGTGTGCACC
TGTATTCCCAGCTACTTGCAGGGCTGAGGTGAGGAGGATTGCTTCAGCTCGGGAGGTTGAGGCTGCAG
TGAGCCAAGATCACGCCACTGCACTCCAGCCTGGGTAACAGAGTGAGACCCTGTCTCAAAAAACACAT
AGGGCCAGGCGTGGTGGCTCACGCATGTAATCCCAGCACTTTGGGAGGCCGAGACGGGAGGATCACT
TCACTCCAGGAGTTCAACACCAGCCTGGCCAACATAGTGAAACCCCGTCTCTACTAAAAATACAAAAA
ATTAGTTGGACATGGTGGTGTGCGCCTGTAATCTCAGCCACTCAGGAGGCTGAGGCAGGAGAACGCTT
GAACTTGGGAGACAGAGGTTGCAGTGAGCTGAGATCGCACCACTGCACTCCAGCATGGGCAGCAGCG
CGAAACTCTGTCTCAAAACAAACAAACAAACAAACAAACACCCATAAACACAAAATGTATCACAGCC
TCAGAGATCCCCACGAATGCCTAAGTGGCCCTGAATTTGGGAGGCACTGCTCAGTAATAGTCCTATCT
GTCCCACAACAGACAGGAGTGCTGGGCTGCACCTACTGGCAACAAACACAGCAACCCTTGACTGAAG
AAAGGTCCATGCCACAATCCCCTTATTCTGTAAGCCACTAATTTTGTCCTCTCTCCTCCACCTTTCACTG
AGGAACGAGCTCTTGGAAGGACAGGGACACCCGCCTAGTAGCTGAGCCAGCCACATCAGTCCTGGAG
AGCAGGTGGAGGGCAGATGCTGTGATCATCCCAGAAGAGAGGACACAGTTGGAGGCAGATGCATGGT
CTCTACTTTCAGCTACCCTCAATGCAGCCTGGTCCCCAGAGGCCTGAAGAGCGCCTTGTTTATGTGGTG
ACCTCAAGAGGGGCTGCTCCTGCACCAAGGCTATGTGTGCATGCTAACACAGTAACCGTCATATACTC
AAAGTGTCAGCTCTAAGAACTGGAGATGAGGAGCTGCAAGCCACTCTACAGTTATCAAAGGCACAGC
TGAGGGGGTTTGTGCTGACCAAGCTGGTTGCCTGGTGTTTGGATTGGGACTTATTTACTTTGGAAAATA
TGCAGCAACAGCCCAGCACCAAAGTTCACATCAAAATCCCACTGATGACCTTGGCTGCTTTCATCTCT
GAAGCGCCACTTCTCAGAAACACAGAGGTAAGTTGGGTTTCTAATGTTTCTGCTGATTATAAATTATTT
TTGGTGTTTACGGATAGGCAACTGGTTCATTTTTCTAGCAAACTAAGAATTCAGAAGCTTTCTACACTG
TTTTAGAAGTGGGAAATGGTTTCATTTTTCAGTGTGCCTATTATAAAATTGTGTCAGTTCCATTGTTGG
GAGAGTTGACAAACTTAGAATAGGAGCTGTGGAATAGATGAAAATATTGTACTTATATTAAATTAATC
GAATTGGATAACTGTCCTGTGATTATGTATGAGAATATCCTTGCTCTTGGGTATTTTCCCTGAAGTATT
AGTATTAAAGGTTAGAGGGGCCGGGTGCAGTGGCTCACGCCTGTAATCCCAACACTTTGGGAGGCCGA
GGCGGGTGGATCACGAGGTCAGGAGTTCAAGACCAGCCTGACCAACATGGTGAAGCCAAGTCTCTAC
TAAAAATACAAAAATTAGCTGGGCGTGGTGGCACGCGCCTGTAATCCCAGCTACTCAGGAGGCTGAG
GCAGGAGAATCGCTTAAACCCGGGAGGCAGAGGTTGCAGTGAGCGGAGATCGTGCCACTGCACTCCA
GCCTGGACAACAGAGTTAGACTCCGTCAAAAAAAAAAAAAAAAAGAAGAAAAAAGAAAAAATGTTA
GAGGAACAAGATATAGGAGACCTACTCTCAAATGGTCTAGAAGAAAAAATGTGTATGTGCATGCCTG
TGAGAACACACACGTACGTACACACACACACAGATAATGACAGGGCAAAGGTTCCAAAATTTTAAAC
CTGGTAAATCTCGGTACGGGTATACAGGAGTTGTTCTACTACACTATTCTTTCAACATTTTTGGAAGTT
TGAACTTACTTCAAAATAAAAAGTTTTCCAAACTTTAGGCAGTTACTTCTCTCCCATTCTGCCTGCTCT
GTTGGGCCTGGAGACCATACACCAGGAGGGATGACGGTTTATCAAGTGTTATGCTCTGATGCGTGACT
GAAAAGGCCAACCCAGCTCTGGCAATTAGCAAGAAAGCACAATATGAAGTTCCCAGGAAAAAAAAAA
AGCAAAACAAACTTTTGAATGATTTATCTTTAAAATATATTGTTTCTCTTCAAACAGTAATCTGGATTT
AATCACAACCTAGTGATAGTTTTTAAACGTCTTCTACAATGTTTGTTATACTAAATAGCAAAACATCAG
GAAGATTTACCTTCAGATCTTTAATTTCAATCCATAAAAGATATCAGAGATATTTTCTCCTTCCTCTGG
TAAGGGAATGACGAAAACTATTTTTGGCTTTTTATCAGATAATGTGGGAACAGGGTATAAGAAGTTTC
CAAATATAACTTCTGAATACCGGGATAAAACATGCATGTCTTTACTCTGCCACTCTATCTGGCCTCAGA
TACGTTTTCCTGAATGCTTATTTATTCAAGTTGGTTTTTGTTTTGTTCTTTAACCTTATTTTTATCTGAGA
AGAAAACATTTTCCCCCTTTGTTCCTTCTTCTTTTGGCTTTCTTTTTTAAAATAGAGATGAGGTCTTGCT
ATGTTGCTCCAGCTGGTCTTGAACTCCTGGGCTCAAGCGATCCTCCTGCCTTGGCCTCCCAAGATGCTA
AGATTACAGGTGTGAGCCCCTATGCCTGGTCTTCTTCTTCTTGATCTTAGCCAAAAGGCCAAGAAGTGA
TAAGAGGAGGACACTTGAAGTGTAGTTGGGCAAGGAGCCTTCTACCAGCTGCTTACTTTCTTTGTTCCT
GACTTTTAAAAGTGTGTTGCTATTGATACACAGTCTCCTGATATGTAAAATGCTGGGAGGATGAAGCT
AAGTTACTCAAAGTGCCATTCAGAAACTGGGCCCAGTTCTATTTGCAGCTACATACATTAGAAATCAT
TTCTAGAGGCTGAGCATGGTAACTCATACCTGTAATTCCAGCACTTTGGGAGGCCAAGGCAGGAGAAT
TGCCTGAGCTCAGGAGTTTGAGACCTGTCTGGGCAACATGGTAAAACCCCATCTTTACCAAAAACACA
AAAAATTAACTGGGTTTGGTGGCACACACCTGTGGTCCCAGCTACTTCAAAAGGCTGAGGTGGGAGGG
TCTCTTGAGCCTGAGAGGAACAGGTGGCAGTGAACCAATATTGTGCCACTGCACTCCAGCCTGGGTGA
CAGAGTGAGACCCCGCCGTCTCAAAATAAAAATAAAAAGAAATCGTTTCTAGAAACTGTTTTCCCGTG
TGTAAACTAGTGGCACTGCAGCCTGAGGCAGGTGCTGAGATGGGGACCTGGAAAAGGCAACAGGCAT
TTTGAGTCAGAAACAATGTGACTTTCCTGCTCCAAAATGTGCAATTCAAAAGTCTTTCTTAGTTGTGAC
TAAAACAAACTTTGAACTTACTATTTCAACAGTATTATAAGGGGAAGACCCAAGGAATGGGACTGGCA
CTGGGAAAACAGCTAGGAAGCTGCTCTGCACGGCCAGGGAGTCTGGAAGCATCCTGGTACTCCAGAG
CGAACAAGGCTGAGCGCTTGATGTGGGGCTTAGAGGCTTAACCAACTTGGTTCGAATCTAGCCACTGC
CACTTATTAGTGACAGTGACGAAAGGCTCAGTCTCCTGATATATAAAATGTTGGGAGGATGAAACTAA
GTTACACGAAGTGCCTTATACAGCGTGTCAGGCATCCAACAGAGGCCATTATCAACATTAACCACACT
GACAGCATTTCAAGCAGAGTATCCGAACAGTTACCCCATCTTCAGGCCTACTGAGTTCAAATATTTGCT
TAACAAGAGCAGCCAGTAACTCTTACCTGGCCTCAACTGGCAGCAGATATTCTGGGCCTCAAATATCT
ATCTAATAGGAAATGGTCACAGACACAAAATAAGCTTAACAAAAGGCAGTTTTTTTTTGTTTTTTTTTT
GTTTTCTGTTTTTTGAGATAAGGACTCACTCTATCCCCCAGGTTGGAGTGCAGTAGTGGCGTGATCACG
GCTCACTGCAGACTCAAGTGATCCTCCTACTTCAGCCTCTCAAGTAGATGGGACCACAGGCGTGTGCC
ATCACACCAGGCTAATTATTTTTCTTTTCTTTTTTTTTTTTTTGAGACGGAGTTTCGCTCTTTTTGCCCAG
GCTGGAGTGCAATGGTGCGATCTTGGCTCACCACAACCTCTGCCTCCTGAATTCAAACGAATCTCCTGC
CTCAGCCTCCTAAGTATCTGGGATTACAGGCATGCGCCACCACGCCGGCTAATTTTTTTGTATTTTTTG
TAGAGACAGGGTTTCTCCATGTTGGCCAGGCTGGTCTCGAACTCCCGACCTCAGATGATCCGCCCACC
TCGGCCTCCCAAAGTGCTGGGATTACTGACCTGAGCCACCGCACCCAGCCTATTTATTTAATTTTTCAC
AGAGATGAGGTCTTGCTATGTTGCCCACACTGGTCTTGAGCTCCTGGGCTCAAGTGATCTTCCTGCCTT
GGTCTCCCAGTGTTGGGATTATAGGCGTAAGCCACAGCGCCTGGCCGGCAGTTCTTTCTGGGGTGATT
AGAAGTTGGGACCATGTATTACCTGTCTGAGTCAGCATTATAAACACCTATGGTCACTGTCCTGGCAA
AACATGGAATCATCAAAGCTCATCTAACCAGAGTGCAGTTAATAACCAGGAAGTAAGCAAGAGAAAG
ACAAAGGATTTGGCAGTCAAAACAGATTTGACAGGCCAAGTCAGATCCTCCTCTGAACGAGTCAGAG
GAACAAATAAAGACAGGATTGCCATAATGCCTCTGTGCTAAAAGCTTATCTTGTTTACTTAAATAAAG
GGAGTGCCCCTCAGGTCTTGAGTAAGAGCTTGCTGACATCACCCTCACACAGACTTTATCTCTTGTTTC
TAACCCTGTGTTAGAAGCAGTAACACAGAAGATTTAGTTGCTCCTGACAGCAGTGGGAGCTATTGTCT
AAGAGATACAAAGGAGAAAAAAGTATACCTGCAGCAAGTGATATCACCTCTGGGGCTGCCACCACAT
CACCTCACTACGCCCTGAGGGGGTCTCAGCACTAGACAAGTTCCAAATCTTTTGCAAATTAAACAACC
CCAGGTCAGGCGTGGTGGCTTATGCCTGTAATCCCAGCACTTTGGGGGGCTGAGGTGGGTGGATCACC
TGAGGTCAGGAGTTTGAGACCAGCCTGGCCAACAGAGCAAAACCCCATCTCTACTAAACAAAATACA
AAAATTAACCAGGCGTAGTGGTGTGCACCTGTAGTCCCAGCTACTTGGGAGGCTGAGGCAAGAGAATT
GCTTGAGTCCAGGAGGCCGAAGTTGCAGTAAGCCGAGATCGCGCCACTGCACTCCAGCCTGGGTGAC
AGAGTGAGACTCCATTTCAAAAAATAAAAACAACAAAAGCCAATTACAACAACAACAACAAAAAAAC
AACGAATTAAACAACCCCAAAGATTGCACAAATTTCAAGTATCTTTAGAATATGTTTTCAGAAAGCCT
GGCCCATGGACATTTTTCAACAGCATCTCCATTGCAAAGGTGGAATGGTGTGAGTCACACAGGCATGG
CTGAGTCCCACTAATGCACATCCCTTCTAGGTACTCTCCAATCACCAGCCCCAGGTGCCCACTCAAGCC
CAGCTCTTAGTGAGGTTTCCCTGACTCTCTGGGCACTTCCACTCCTACCACACAGGGTAGAGCCACACC
CCTTTCCGTACCCCCATGTGCTCTGGCAGCATTATTTTGAGAGCCTTCGCTTTACTGCACGTCTGTCCCA
TCTGTCCCCTGACTGGTCCATGAGCCCCTGGTGGGAACTTTGTCTCTGGTAACTAAACACTGTCTGGAG
GTGGTGGACAAGGTGTCTGGAGAAAAACAAACTCCTCCCTGGGATGCCTGAGCTCCCAGGATTCTAGA
AGGTTAGTTTTGCAAACCTTTAAAGAAGGGATTTTCATCAAGGGGCCCACAGATCCTTCATTGAGGTTT
ATGAGTCCCACATCAAAGGTTGGGTGTCTATCTACATCAGATTCTCTTAAAGTCCATGATCCTAAAACA
GTTAAGAACTAATGCTGTGAGGGCCTCTTCCTGGGTCAAAGCCACAGGGAACCTGCCATGTGGATGCT
GCAGCGGGGTGTGGATCAGCCAGGCCGCCTTTCACTGTGTTCTGTTTTCCCTCCCAGCTTTAGCTCCGC
CAAAATGAAACACTCATTAAACGCACTTCTCATTTTCCTCATCATAACATCTGCGTGGGGTGGGAGCA
AAGGCCCGCTGGATCAGCTAGAGAAAGGAGGGGAAACTGCTCAGTCTGCAGATCCCCAGTGGGAGCA
GTTAAATAACAAAAACCTGAGCATGCCTCTTCTCCCTGCCGACTTCCACAAGGAAAACACCGTCACCA
ACGACTGGATTCCAGAGGGGGAGGAGGACGACGACTATCTGGACCTGGAGAAGATATTCAGTGAAGA
CGACGACTACATCGACATCGTCGACAGTCTGTCAGTTTCCCCGACAGACTCTGATGTGAGTGCTGGGA
ACATCCTCCAGCTTTTTCATGGCAAGAGCCGGATCCAGCGTCTTAACATCCTCAACGCCAAGTTCGCTT
TCAACCTCTACCGAGTGCTGAAAGACCAGGTCAACACTTTCGATAACATCTTCATAGCACCCGTTGGC
ATTTCTACTGCGATGGGTATGATTTCCTTAGGTCTGAAGGGAGAGACCCATGAACAAGTGCACTCGAT
TTTGCATTTTAAAGACTTTGTTAATGCCAGCAGCAAGTATGAAATCACGACCATTCATAATCTCTTCCG
TAAGCTGACTCATCGCCTCTTCAGGAGGAATTTTGGGTACACACTGCGGTCAGTCAATGACCTTTATAT
CCAGAAGCAGTTTCCAATCCTGCTTGACTTCAAAACTAAAGTAAGAGAGTATTACTTTGCTGAGGCCC
AGATAGCTGACTTCTCAGACCCTGCCTTCATATCAAAAACCAACAACCACATCATGAAGCTCACCAAG
GGCCTCATAAAAGATGCTCTGGAGAATATAGACCCTGCTACCCAGATGATGATTCTCAACTGCATCTA
CTTCAAAGGTAAGAGGCACCTTTACAGTTCTCACAGCAAACCCACAACATACTATTTTTGTATGTGGGT
AGATTGAATGCCAAGAACTGTACTGTAGCTATAATTTATCCAGGAAAACTAGACACAAGATTGACTCT
GGAACGGGGACAGGGAAGGCCAAGCTGAAGTGACAGTAGCATCTGACACTTACTGAGCCCTAACTCT
GTGCTTTAACACAGCCTTGTGAGGTCATCACTGTTATTAGCATCCCCATTTTACAGAGGAAGCCACCAA
CACATGAAGTAAAAGGATGGGCTGGGCGCGGTGGCTCACGCCTGTAATCCCAGCACTTTGGGAGGCC
GAGGCAGGCAGATCACTTGAGGTCAGGAGTTCGAGATCAGCCTGACCAACAGACCAACATGGTGAAA
ACCTGGCTCTACTAAAAATACAAAAATTAGCTGGGCCTGGCGGTGGGTGCCTGTACTCCCAGCTACTT
GGGAGGCTGAGGCAGGAGAATCACTTGAACCTGGAAGGCAGAGATTGCAGTGAGCCGAGACTGTGCC
ACTGCACTCTAGCCTGGACGACAGAGTGAGACTCCATCTCAAAAAAAAAAAAAAAAGAAGTAAAACG
ATGCTCCAAGGGCACCCAGTTATTAAGGGGCAGAGCCAAAGCTGAACCCAGGGAGGCCAACCCTAGC
AATCTGTTAAATTGGAAGAAATAATACAAAAACTGTTTTAGCATTTGGCCAGCCTGGATTTGAGTTTTC
TCTTTTCCTTTCCCAATTATCAATAAGCAGGAATATAGACAAAAGGCTAAAGAAATGCACCTGTGAAC
TATTCAGCTTGAGCAGCTGACATTGACACCTACAAGTGCTTTTCAGGATACTTTTGAACTACTGGGCAG
GTGGGATGGAGAAATAAATTACTATTTCCCCAGCAACTGTTCTGGGCTGAGCACAAGGGCACTTTTTA
AGGAGGTCACCCCACACCCATCACACACACATAGGACCCCTGGAATCCTAGGAATAAATAAGCATGG
ATTTGTAAAATCCAAACCTCTCTTTTCAAATATCCTCACCTGGACCAGACCAGAAGAAACCTCTACTTT
ACTCTCTAAGCTGAGAGTGTGGAAGGGGAAACACGAGGAATGGTTCGGCTTCAGGACTAATTGCGGT
GACACACAACCACTTCTCTTTGCCACCAAGGACTACCAGGTACCTGCAAAGGGCAGTACTTGGAGGCC
AGTGCTTTCTGCTAGTTAGCTCCCGTGGTTTTATAGCAGCCCAGGCGAAGGAAGGAGACCCCCCCCAG
CTCCTGGCTTCTGTTCAGGGAAAGGGGGCCAGAGCCCCTCCTGATCTGTCCACACACCTGCTCTGTGCC
TTGGCTGAGGCCCCTGCAGCTCTACAAGGCAGGCATTCTGCTGGATAGGCCAAGCAGGGTCACTCTGA
CACCCAGGTTTCCACCCCAAGGCATGGCACAATGCTGGCCTCCTGTGGGTGGAATCAAAGGCTGAGTT
CTAACAGGCTTGCGGCAGACACACACACAGAGACCACATGTACATGATGAACACACATATCCTTTTCA
TTACAGGTTATTAGTACAAGTTTTGGAATTGAGCAAACAAGAGTCTAAGCGCTGGTTTCACCACTTCTC
GTTTGTGTGACCTCAGACAAGTCATTCAACATCTCTATGACTCAGTTTCCTTATCTTTATCACAGAGAT
GACACCCACTCTGACAGGGCCGAGGGAAGAACCATAAGCGATGGCAATGCAACAGAGTGGCACATGA
CAAGAGCTCAGCGAATTTGAGGGAATGAAACTGTAGATTACAATACTAGTACAATATGATAAACATAT
GATATTGTTAGTGACATTTATTTTACTTCTACTAGCAAATAACCTATGTTTAGGACTGACTTTAGAACA
GGCTGGCAGAAGCATTTTTGGCAGCATCAAAGTCCTCCAACCTACTGGTCTGTTGGAGCCCCCCAAGT
ACACCAAAGAGCCTCTGCATTAGCCCTGGCTGAGGGTTCAGGGACAGGCAGAGAAGTACAGCAGTGA
GCCATCCCTGCCTGCATGGAGGTGGAGAAATGATCAGGCATGGTCAGTTGACAATCTCCTAAACACAG
TAACCCGTGTCATACCACAGTGTAAACACACGTGCAAATGCTTCTGCTTCCTTTCCCCATCATGAGAAT
AGTCACTCAATGCCGGGCATCACAAGGGATCAAATGCTAGGAGTACCCAATCATTCATGGATGCTTCT
CAAAGGGGACGAGTGTCTAGAAGTGTAATTTTAATTTCACTTAATTTCATATGGAATCATCTCCATTAC
TAATTTTGTTCTAATTTTAATGTGATAATCACTTTGTAAAGCACAATAAACAGAGGCAGGCTCTCATGA
GGAAGTCAGAAGGAAAGAATCCCAAGAGACATGGGACAGCTCCATCCAAACTGAAAGGGCCGTGATT
CCCAAAAGAGCAATTTTGTCCCCAAGGTCTGAAGACACTTTTGGTTGTCACAACCTGGGGGGTTGGAG
TAAGCATTACTGGTATCTAGAAGGGGGAGGCTGGGGATGTTGCTAAACACCCTACCATGCACAGGGC
AGCCCACATTGCCACAAACTATTATGTGGCCCAAATGTCAAAAATGCTGAGGTTGAGAAACCCTGGGT
GAGGCAGACTCAGGGAGAAGGGAATCGAGCTTCACTCACAGGCAGGCAGGAGCTGTCTGGTACTTCA
ACCTCCAAGACACCTCCTGCTCATCTCATCCTGGCTGCTCTACCCACCAGCTAGAAACCTTGAACAAGT
TACTTCACTTCTTTGTGCCTCTGTTTCCTCATATGTAAAAGAGGGATAACAAAACGCACACAACTTGCA
TGTTGCTAGGAGCAGAAATGAGATAATACAGGAAAGGTGCTGAGAAGAATGCCCGGCACATGGCCAG
TTCTCAACTACTAGTCACCCATTACTATTAGTTACTCACATCTTAGAGCTAACATAGACATGGGCTTAT
TCCTGGATACACAGCACTGTCCCCATATCTACAGTGGTGATCCTAAGGGCAACATGGCATCACCCAAA
TGTCTTGTTAGTCACTACAGAATCACAGTGTGAGGGATGAAGGCCATCAAGACAGAGCTGAGGCTGGC
AGGGTGGCTCATGCCTATAATCCCAGTGCTTTGGAAGGCTGAGGCAGGAGGATTGCTTGAGGCCAAGG
GTTTGAGACCAGCCTAGGTAACATAGCAAGACCCCATCTACAATTAAAAAAAAAAAAAAAAAGACAG
AAAGAAAAAATAGCCAGGCGTGGCATGTGCTTGTAGTCCAAGCTACTGGGGAGGGAGGCTGAGGCAG
GAGGATTCCTTGAGCCTGGGAGTGTGAGGCTGCAGTGAGCTATGATGGCATCGCCGCACTCCAGCCTG
CATGACACAGTGAGACCTGGTCTCAAAAACCAAATAATAATAACAGTAATAAAAGCTGGAAAGAGCT
CAAAGTTACTCATTTGACAGATGTGACAGATGAAGAAATAGAAGCGAGTTAGGTGCCTTACCATGGTC
AAACAACTAGTTCGTATCAGACCCTACTCCAGAAACTATTCCAGTCCGGGTAACCTCTCGTTAACCTCT
CTTGTTAGAAATGCAAATTTCTGCCCAAATCAGGCCTCAGGAATCAAGAGACTGTGGGGTCGGCTCTG
CAGGCTATCTGAATGAGGCCTCCAGGGAAATCAGATTCACTCTCAAGGGTGAGACGATTTCCCTAAAG
GAACCTTCTCATAACAGCCTCTTCCTGTGGCCTTTACAGGATCCTGGGTGAATAAATTCCCAGTGGAAA
TGACACACAACCACAACTTCCGGCTGAATGAGAGAGAGGTAGTTAAGGTTTCCATGATGCAGACCAA
GGGGAACTTCCTCGCAGCAAATGACCAGGAGCTGGACTGCGACATCCTCCAGCTGGAATACGTGGGG
GGCATCAGCATGCTAATTGTGGTCCCACACAAGATGTCTGGGATGAAGACCCTCGAAGCGCAACTGAC
ACCCCGGGTGGTGGAGAGATGGCAAAAAAGCATGACAAACAGGTATTTCACACTGTGTGTTTGTTCTT
TTGAGCTCCCAGATGCTGGGGGTGTCTGGGAATACTGGAAAATGGATCATTTTTTTAAAAAGGGAGAA
TTATGTACAAGTACCCAAGAACTTCCATACAGGGCCACTCTGTTAATTCAGCCCCAATTTGTTGCTTGA
GATAAGAGATGATTAGAGAGCATTCATAAGGGACACATCTGCCCTCTAGGGGCCAGTTTCAGAAGTTA
GAGGCAGATGACTTAGAGACAGCTTGGTGCTTGCTTTGTGGCTTCGAGTCCCAGCTTCATCATCCCTAA
AATGGGTATAATTCCATTACTTCCCCGGGTCACTTGAGAAAATAACAGAATCAGCGATGCTGAGCGCC
CCTCCCAGTACTTGGAACCTAGGAGGCACTCAAAAAAAGATTGGCTCAACTCTTCCCTGCCCAGGAAA
TTCCAAGGTCCTCTTAGCCTACCGAGGACACATCATTCATGATTTCCTCTATTATTATTCGTTACTTTGT
AGTTAAAACTGCAGGTGTTAAGTACTTATTGAGATTATTATTGGGTCATGGCAGAAAGAATGGAGAGG
TCTTATTTCTGTCTTACTGGATACTGGCTAGGCCCATATGAAGAAGTGATTCTGGTTTGAACCTCCTTA
TAGGACAAGAATACAAACATATGCAACCAAACTGAGAAAAGTAGGCTCTCAGAGGAAGGTATTTGCC
CGGGTAGCCAGTCATCATGCTCTGTGAATTTTTCCTTAACAACGTCCCTTCTGTACCTGCCTCCTTCCAT
TCCTCCCTGCAGCCCGGCAGCTCTTGAGAAAGGGACTGCATCTTTTTTTTTTTTTTTTTTTTGAGACAGG
GTCTTGTTCTGTCACCCAGGCTGGAGTGCAGTGGCATCATCATGGCTCACTGCAGCCTCAACCTCCTGA
ACTTAAGTGATCCTCTCACCTCAGCCTCCTGAATAGTTGAGACTACAGGCGTGCACCTTCATGCCCAGC
TAATTAAACTTTTTTTGGTAGAGATGAGGTCTCGCTGTGTTGCCCAGGCTGGTCTTGAACTCCTGGCCT
CAAGCAGTCCTCCTGCCTTGGCCTTCCAAAGTGCTGGGATTAACAGGCGTGAGCCGCTGTGCCTGGCC
CATTTGACTTTTAATTGAGATCTTACTTGGTGCAAGGTATGAGCTAGGTAAAAGAGTGAAGAAGATCA
AGCCTTCCTGCCCATCCAGCTGGGATTGCACCTTAAATCTCTTTATCCCCTGCAAAGTGCCAGACTAAC
TCCACAGGCACTACTGTTGCTATCCGCCCCCTTAGGGATTGAGTAAGTTGAGGCAAAGATTGAGAATA
TTCAGCATTGTCTAGTATATACAGGAAAGGTTCTTTTTAAAAGTACACTACCAGATATTCGACTCCTTA
ATTACAAAAAAAAAACCAAATGCCTAAAATTGGGAAACCAAACCAGAGAATTATTTTAGATGCCTTTT
TAAACCATAAACCAGGAAAAGTTCTGCTGCTAACCTTGAAGATAGGAAACGAACCATACAGTCTCAA
GGAAATAATCATGCAACAGAAAACACACCTCAGTTTTCAGTAGCGGAATTACAAAGGAGTGTGCTTCC
TAAAATCCTCAACTGACAGTCCCGGAATATAAATTTTAATAAGTGCTATATCAATTCTGTGATAAATAT
AACCCGTGGCCCTTTAAAGGGAAAATCATGATTCTTTTGTAACTTGTGGTTCAATAAAACTGGGCCCCC
CTTTCCTTTTCTGTCTAGAACTCGAGAAGTGCTTCTGCCGAAATTCAAGCTGGAGAAGAACTACAATCT
AGTGGAGTCCCTGAAGTTGATGGGGATCAGGATGCTGTTTGACAAAAATGGCAACATGGCAGGCATCT
CAGACCAAAGGATCGCCATCGACCTGGTAACCACTCCCTTGTCCACCCCCGACCCGTCCCCAGGGTCT
GCCTCAGCACAGCCCCACCTCCACTTGCCCTTCCTACCCACCCCCCAATCTCATGTCCCAGCTTGGGGT
GCTGAGTCTGCTCTTCGGCCTGGGTGGGATACACAGAATGCCTAGTTTCATGGATGCCAGCTGGAGAG
CACGGCACCTGGCAGACACTTACTGGGCAGGGGGGATCCCAAGAGCAGCCATGGGGTGAGCCCCACT
CCCGCTGACACCAGAGACAGGGGAGACATGTGCTGCGGTCTGGGAAATAGCTACCCCCAGCCAAATC
ATGAAAGAGCCATTAAACACCGCACTATACACATACTTAACTTAAACCAATCGGGCGCTCAGCAAAA
GAGAGAGAACACCAGTCCAAACAGTGCAGCAGACCCAGTTCCCCATCCCGGAGAAGTGCGCAGCAGT
GTGGGGAGCTGGAGCTGGGGTGGCTGTCCTGCACCAGCCCCCACGACCCTCAGACCACAGGCACTGCC
AAGAGGGAACATGAACCTAGCCGGCCTCTAAGTGCAACGGCTGCCCCTGACAGGTGGTGACAGATAT
TTTCAAGAGTGACTCTGACCAGCTGTGATTTCCACCTTACATGTTGTCTTTGGATCCTTTCCCTGAATGA
TATGAGATTGTGCTGGGAACTCTAGCCCTCTGTGTGCTGACCTCCAGAATCTGACAACTTTCCTTTCCA
AACAGTTCAAGCACCAAGGCACGATCACAGTGAACGAGGAAGGCACCCAAGCCACCACTGTGACCAC
GGTGGGGTTCATGCCGCTGTCCACCCAAGTCCGCTTCACTGTCGACCGCCCCTTTCTTTTCCTCATCTAC
GAGCATCGCACCAGCTGCCTGCTCTTCATGGGAAGAGTGGCCAACCCCAGCAGGTCCTAGAGGTGGA
GGTCTAGGTGTCTGAAGTGCCTTGGGGGCACCCTCATTTTGTTTCCATTCCAACAACGAGAACAGAGA
TGTTCTGGCATCATTTACGTAGTTTACGCTACCAATCTGAATTCGAGGCCCATATGAGAGGAGCTTAGA
AACGACCAAGAAGAGAGGCTTGTTGGAATCAATTCTGCACAATAGCCCATGCTGTAAGCTCATAGAA
GTCACTGTAACTGTAGTGTGTCTGCTGTTACCTAGAGGGTCTCACCTCCCCACTCTTCACAGCAAACCT
GAGCAGCGCGTCCTAAGCACCTCCCGCTCCGGTGACCCCATCCTTGCACACCTGACTCTGTCACTCAA
GCCTTTCTCCACCAGGCCCCTCATCTGAATACCAAGCACAGAAATGAGTGGTGTGACTAATTCCTTACC
TCTCCCAAGGAGGGTACACAACTAGCACCATTCTTGATGTCCAGGGAAGAAGCCACCTCAAGACATAT
GAGGGGTGCCCTGGGCTAATGTTAGGGCTTAATTTTCTCAAAGCCTGACCTTTCAAATCCATGATGAAT
GCCATCAGTCCCTCCTGCTGTTGCCTCCCTGTGACCTGGAGGACAGTGTGTGCCATGTCTCCCATACTA
GAGATAAATAAATGTAGCCACATTTACTGTGTATCTGTTATAATTCTCTATTTTTTGAAGCTCAAATAT
CAAAAGCCAAATCCAAATTCCTGGATAACTCCAGGTATGATAAAGGCTGAGAGGAAGTCACTTGAGC
ACCACAATGTGCCACAGCAGGGCATGTTCTCAGGACAGGACAGGTGTGTGCTGAATCCTGGGGAGGG
TCTGTGCAGTACCCCAGAACTGTGGGGTGCTAAGTGGCACACAAGCCCCAGGGCTCCCACAGTCTATG
CCAGGCTGCTGCAGCTTTCATCCCTCATACCTGGTCCTGCAGTGGGTCTGGTTTGACAGAGCAGATGAC
ACCTGAGGAATATGTTTCTGGATCCTTCAATCCCTGGGTAAGACAAGTGAAATCCACAGAGGCTGTTC
AGCACGCAAGAGTGCCAGTGCTCTTTCAGTGAGGGGATGACTGACGGTCACAGGTGCTGTGTGTGCAG
GTGTCTAACTGTAACCCCCACAGCCTGGCAGATGAGGAAGACAAGGGTTGGAAGAGTTCTGAAACCT
GTCCAAGATGCTGAAGTAGTGGGGCTGGGTTCAAGTGCAGGTTGGCTGGACTCCAGGGACCACACAA
GGAGTCCTGTCACAGGCTTCTGACCCCATGAGACCAATACCAGTAAGAAGAGTGGTAAAAGGGAGTA
GGGACGGAAGGGGAACGTCACTGCCCTTTGTAGGCATGCCTGTGGGTTATCTCACAGAGTCTCCTTAC
CCTCAATCCCTAGGGGGCTGGCACTGTTACCCCTCCTTTTTACAGCTGCAGAAGCAATTTCAGCTCACA
GAAGGGAAGGCCTCTGCCTGAGGCCTGAATCCACACCCAGGCAGGGGGACCCTGCAGCCCTGCTTTCC
CCTGCTCCCTTCCTGACTTCCCACACTGGGCTCTGCCTCCTTACTCTGCTGAGAGCAGATGGTGCAGGG
GCTGGATGAATTGCCCCAAGCCATCCTCTCGGCTTCCTGGTGAACCCTGATGCTGCGGATGGCCCACTC
CTTCAATTCATTCTCCAATCTGCTTCACCCCTCTTCTTTTCTGTCATTCTCCAAACTGCTTCACCACTCTT
CTTTTCTGTCATTCTCCAACCTGCTTCACCACTCTTCTTTTCTGGTGCCTGTCCTATATTTCTCATCTTGC
TGCAGCTTCCTTTTGGCTCTTCTCATTTCTAAATGTAATAATCTCAAAAAACCCTTTTAGTCCTTTGCCA
TGTCTGTCCCATACCCAGAAAGGCAGTGGTCACTTCTGCTCACCCAGCGCCCTCTCTGCTACAGCCGGT
GTGGAGTCCTCCACACTCTTGAGCATCCAGACACCCCCGTTTCAATGCCTTTTGTTCATGTACACCCAC
TCAGAATCTCTCAGATCCCCTCTTACAGAAACTAGCCCATCTGTTACTCAAAGCAGGAGAGTACTCATT
CAGAACACAGGCTCTGAGCCAGGCTGCCTGGTTTGAATCCTGGCTCTGCCATCTAGTAGCTATGAAAC
TCTAGTAGCAGGTTCTGTGCCTCAGTATCCTCATCTGTAAAATGGGGAGACCAGCAGCACTTACCTTG
AGGGATTGCTGTGAGGATTAATCAAATTAATGTCTAGAAAGCATTTATTTATTTATTTATTTATTCATTT
ATTTTATTTTTTTGAGACGGAGTCTCGCTCTGTTGCCCAGGCTGGAGTGCAATGGCACAATCCTGGCTC
ACTGCAACCTCCGCCTCCTGGGTTCAAGCAATTCTCCTGCCTAAGCCTCCCGAGTAGCTGGGACTACA
GGCACGTGCCACCACGCTTGGCTAATTTTTGTATTTTTAGCAGAGATGAGGTTTCACCATGTTGGACAG
GCTGGTCTCGAACTCCTGACCTCAGGTGATCTGCCCACCTTGGCCTCCCAAAGTGTTGGGATTACAGGT
GTAAGCCACCATGCCTGGTCTGGAAAGCATTTAGATCACTGCTTGGTTTTAGCAAGAACTAGGAAAGG
TTGTCACATTATTCTCAATCTAAGAGAGTACATAAGCCAGGCC
(ZPI)
SEQ ID NO: 2
AATGTGGGTTGGAGCCCCCATACAGAATCTCTATGGGGGCACTGCCTAGTGGAGCTGTGAGAAGACG
GCCACCGTCCTCCAGACCCCTGAATGGTAGATCCACCGACAGCTTGCGCCATTTATCCGGAAAAGCCA
CAGACACTCAACGCCAGCCCGTGAAAGCAGCCAGGAGGGAGGCTGTACCCTGCAAAGCCACAGGGGC
AGAGCTGCCCAAGACCAAGGGAAGCTACCTTTTGCATCAACGTGACCTGGACTCAAAGGAGATCATTT
TGGAGCTTTAAAATTTGACTGACCTGCTGGATTTCAGACTTGCATGGGCCCTGTAACCACTTCGTTTAG
GCCAATTTCTCCCATTTGGAACAGCCGTATTTACCCAATACCTGTAACCCCATTGTATCTAGGCAGTAA
CTAGCTTGCTTTTGATTTTACAGGCTCATAGGCAGAAGGGACTTGCCTTATCTCAGGTGAGACTTTGGA
TTGTGGACTTTTGGGTTAATGATGAAATGAGTTAAGACTTTGGGGGACTGTTGAGAAGGCATGATTGG
TTTTGAAATGTGAGGACATGAGATTTGGCAGGGCCAGAGGCGGAATGATATGGTTTGGCTCTGTATCC
CCACCCAAATCTCATCTTGAATTGTACTCCCATAATTCCCACATGTTGTGGGAAGGGACCCAGTGGGA
GATAATTTGAATCATGGGGGTGGTTCCGCCATACTGTTCTTGTGATAGTGAATAAGTCTCACAAGATCT
GATGCCTTTATTGGGGGTTTCTGCTTTTGCGTCTTCCTCATTTTCTCTTGCCGCCACCAGGTAAGCAGTG
CCTTTTGCCTCCCACCATGATTCTGAGGCCTCCCCAGCCACGTGGAGCTGTAAGTGCATTTAAACCTCT
TTCTCTTCCCAGTCTCGGGTATGTCTTTATCAGCGGCGTGAAAATGGACTAATACACTGTGGTTATGTA
TTATAGTCATATGATATTTTCATATTTTTGGAAGCTGGGTGAAGGGTAGATGTGGAGACCATGATTTTT
GCAAATTTTTTTAAGTTTAAAGTTATTTCTAAATTAGAAGTTTAAAAAGAAGAAATCACATAAGCCAT
AACACAATAGAAAGATGTCTTTAAAGTTCAAGGCAGGAGGGATGTCTGGAAATCAGCGAGAAATTTG
CACCTGTGTGTGCATGTGCATATGTGTGTGTGTATGTTGCAAGGACTTGGAAAGCCCTTTTTTTCCTAC
CTCTGTACTACTGTGGGGGGAGGCTAAACTTGACTTCTTCCCATCTTAGTTCTTTTTTGGGATAGACTC
CTGTAACAAAAGACAGACAAGAGAAAAATCAGCTTACAACATGGGCCATGCACTTCACACAGGAGAA
ACCTGCATGAAAAGTAACTCAAAATGGTGCCTTAGAACTCCACTTACCTTTAGTAAAGAGCAATAAAT
TAGCAGGAAAATCATGGATCGGGACAAGGGAAGTGGTTTTATGCTTCCAAGGGCAGGAAATCATGGA
AGGTAAATATATGGGAGGAAACTAAAGGAATAAGGCTTGTTTGCATATTCCTCTGATGCCATCTCTGG
GTTGATAAGAGTCTAGAGTCATTTCCAGTAAAGATGAATTTTTATCTGTCTTTAGGAAGAAAGGGGGA
AAGATAGAGAAAACTATTTCTCCATTTGCTGTTTCTTAATTACCTTCAGTTCAAAAATAATTTTTATATC
AGAAAGGCATATTTAGAGGTATGTTAGTTTATTTTCACACTGCTAATAAAGACATACCCAAGACTGGG
TAATTTATAAAGAAAAAGAGGTTTAATGGACTCACCGTTCCACATGGTTGGAGAGGCCTCACAATCAA
GGCAGGTCTTACATGGCAGCAGGCAAGAGGGAGAATGAGAGCCAAGCGAAAGGAATTTCCCCTTAAA
AATCCCCTTATAAAACCATCAGATCTCGTGAGACTTACTCACTACCACAAGAACAGTATGGGGGAAAC
CACCTCTATGATTCAATGATCTCCCACTGGGTACCCCCCAACAACACGTGGGAATTATGGGAGCTACA
ATTCAAGATAAGATTTGGGTGGGGACACAGACAGACCATATCAAGGGGTAACATAGTCTGGTTTCCTT
TACTACCCACCTACCCAAACACCCCCTTCATCTGATCCACACAAAGTAAACTCTTGCAGTTCTCTCACT
GTTTCCTGGAGTCTGCTTTTGGTCTCATAGGACTGCCCTAACGCTTGTTTTTCAGACGTTTAACCCTGTA
GGTCTCTGGACAAATTTGCTTTAGAAGCCCCTCGATGTCGCCCTGAAGAGTGGCTTTCAGAAGTTGTGC
CTCCTGCCTGAGGGGAGTTCCAGGAAGGGTTCTGCATCGCCTATGAGTTTATCTGGATCACCAGAGGC
CTTCCCGTCAGAGCTTTCCCAATCGTTTTTGGCCAAGGAGTGTGAGAAGCTAAAGTTCATAACAACTG
GAAGTCAGACAGCCTGGTCTATTCTGCTTTAACTCTAGCAGGAAAGGCCTTCATGGTGGGGCCTGAAT
ATCTTCCTTTATAAAATCAAAGCCTGGGGACAGGGTTACTTACTTCTGAGGTTCAATCTGGCTCTAAAA
TTATGCAACAAATGCCATTCCTTTAGCACTTCCTTCCTACCGGGCGAGATACTCAACTCCACAGGCACC
ACCTCAGTTCATCCTCTCAGAAGTCCTAACAGCTCAGCCTGGGGCACCCCATTTTACAGATTAGTAAAC
TGAGGCTAAGAGAGGTTAGGTAGCTTGTTCAGGGTCATGCTGCTGGTAAAAGAGCTCAGGCTACAGTG
CTATGCATTGAGTTTTCTCACTTTCCCATCTAACTGGAGGGCTAAAGGTCAAAGAGTGGGCAGCTCCCT
TGTTGGGAGCTGTACAGGAATAATGTCCTCCCTGAAGGAGGGGGACTTCTGAGCCACACCCTGGGGTC
CAGGGCTCACAGCCTTAGGAGCAAAATCGTCCACCCCCTTCCTGGTTCCTCGGTGCTGCAGAGATATT
CATAGGACAGAGTCTGAGTTCTGGCCACTTAACAGAGGAAGAAAGGCTGGCTCGGTGAGGTTAACTT
ACATCCCAGCAGCTAGGAACCGGGAGCAGAGGACCTCAGATTCACACCAGGGCAGGAGGCAATGGCC
TGGCTGAAGCCTTCACAATCTTCCCAATATACTCCGCTGCCTTCCTTTATAAGGATCCATTTCTGAAAC
CCTGTGCCCTGGCCAGGCACGGTGGCTCACACCTGTAATTCCAGTACTTTGGGAGGCCAAGGCAGGAG
GACCACGAGGTCAGGAGTTTGAGACCAGCCTGGCCAATATGGTGAAACCCCGTCTCTACTAAAAATAG
AAAAATTAGCGTGGTGGCAGGCGCCTGTAATCCCAGCTACTCGGGAGGCTGAGGCAGGAGAACTGTT
TGAACCTGGGAGGTGGAGGTCTCAGTGAGCTGAGACAGACAGTGCCTGGGTGACAGACAGAGACTCC
GTCTCAAAAAAAAAAAAAAAAAGAAAGAAACCCTGTGCCCTAAGACCTGCACACTCGCTGGCTCCGC
TCAGACATTTAGCAAAGCAGACACCTTCCCAGGCCTGGAGGAAACAGCCCCTGCTTTTTGGGAATCCA
CAAGCCCGCAGCTGCAGAGCTCGACCTGGATGGGCAGGCAAAGGCTGACTCCTGTGCGTGGTGTGAG
TCCAGCCTGGCCCCTCTACACCCTCACTTTCACCTCTTAAAGAACTGCCTATTAACAGAGCAGGTACTG
CCCAAAAGGAACACTCTGGAAACTTGTTGGGACACTTCTGCCTTTCACAAACGTTTGGGGGGAGTACT
ACTAGCATTTAAGGATTGAGGGTTAGCAATGCCAGACATACCAGAACACGCAGGGCAGTCTCCCATG
ATGAAGAGGCCGCCGGGTTCCCCAGGACTCACATGTCCACCTCAAGTTCACGTGGGATTATCTGAGCC
TAGACTGTCAGTCCTGGGGCTGCTTTATTTCATATAAAAATATAATATTTATCCAAGGTTTTACTACAC
ACTGCATTTTCTGTGAAGACAATGACCGTGTAAATCAGGGAAAGATCTATATTTTATTTTGTTTGAAAC
TTTACCAAGCATTATTTACCATTTCAAAAGCTCTATCCCTGGTAGTACCATTGGTTTTCTTGTTCACCGG
CCAGCAGTGAGCAGCACACAAGCGACCTCCCGTGGGCTCCACATTGGACAGCCTCACTGCACCTGCCC
AGGCCCTTAGGCCACAGCACTGCCATATTCAGGGACACATTATTCTCTTTTATTATGCCTCCATATTAT
CATTACAGCATTATCTTTTTTTTAATTTTGTGGGTAGATTATATTAGCTATACGTTTCACTTCAATGGTA
GTAGTAAGGGGCACATAACAAAATATTTACTTATATATATTAAAAAAGAGAGTCTGAGAAGTCTGAA
AAGTTTTGCCATAAACGGTCTCCACCAGCCTCAACTCTGAGTGCCCGAGGATTCAGTCTCAAGTCCAG
CAACATTGTGAAGCAGGAAATTTACCTTGAAAGGAGCTATGTACTCTAAGTAGTGATTTACCTGTCTG
CCTCCCCCACTGGATTGACCAGTTCCTTGGGGGCTGAGAGAACAGGTCCTGAACATTTCTGCTGTGCCC
CCCAACCCACATCCTCATAGTGTCCAGTACCAGGCTGGGGACTCAGGAAGCATCCATGGGATCCCCCA
GTGCCTTCTTTCTCGAGGTGTTCAGCACCTAGAACAGCTCAAGACAAATTCCCCACACCCCACCCAGA
CAGAGCTGAATCTTACTGGGGCGAAGCCTTGAGTTGCAAGGCAGAAGCTCTCGTGATGGGATTTGGGT
CATATTCCGGGTTATAGGAGGAGCTGGGGAGTATGGGAAGCCTCCCACTTGGTCTTTGGTTTTCCAGA
AACTCCACCATCACAAGCAGGATGTTAATCAGTAACCGTCCCACAGGGGATCATACTTTGGAATAGCA
AATATTTGCTGAAGGTTCTGGGCTGCAAAGCTGAAGCTTTGGTTTCTGCTCTAAATGAAGGACTTTTCC
AGGACCCAAGGCCACACACTGGTAAGAGGCAGTGGGTTACAGGAGACCTTCAATGAGTCTAATCAGG
GAGGGACCGGGAAGGATGGTATCATCCCTGGGCGGGCTCCAACGTGAGGGCTGTGTGGCTGAGCAGT
GCAAAGACCTCCATCCTACACTCCACAGGGACTGTACATACAGATTGGGAGCTGGAGTGGGGTAAGA
GGCGAATTATAGACACAAGGGGCTCCTCTGCAGGAAGGAGGCCAAGGGAAAGAGGCTTGAAAGGCTT
GATATTTCACCCACCACCACTCACTGCCGGAGTAAGCAGGTCTCCCCTTCCCAGGGCTGAGGGGAGGC
AGGGATGTGTGCTGTCCCAGGGCTGAGAAGTGGCAGGTGAGCTGGTGATTCCTTACTGCCCAGGTTCT
GTCTAGGAAGGTGCGTCCTCACCATGCTGGATGGTGTCCTAGTCCAGGAGCACCCCCTGAGCTCCTGG
CCTAGACTCCAAAGGGTTGGGTAGATGAGCAAAGACTTTACAAAGACCTTAGGCGATATATGTCCAGG
AGCACCCAGGAATTACTGGGCTACCACTGCAGACTGCAGGACAAGCTCCAAGAACAGGAAGGTAAGA
CTCAGCATTTGGAGGTGGTGACATCTAGTTGGCGTGCTGGGCTAATTTCCTGACCATTGTACAGGGAG
AAGTAACCTTGAATTCAGGAGTATTCTGTGTGGTCTTAATGTAGAAAGTAGCACTAAATGATGCCACG
TAATCGTTTTAGCTCAGGCTCCTCTAACAAAACACCACAGGCTGGGTGGCTCCAACAGCCATTGATTTT
TCACAGTTTTGGAGGCTGAAAGTCCGAGTCAGGGTGCCAGCGTGGCCGGATTCTGGTAGGGCTGTCTT
CTTGGCTTGCAGATGGCCACCTTCGCACCGTGTCCTCCCATGGAGAGGAGGTGCGGAGGGGGACTCTG
CTCTCTTCTTATGACAGCACTAGTGCTATCACAGGGGCCTTGCCCTCACGACCTCATCTAAACCTAATC
ACCTCCCAAGCGCCCCAACTCTATTGCCATCACAATGGTGGTTCGGGCTTCAACTTATTAATTCTCAGG
GGACACATTCAGTCCATAACAATAAAAGCGTGAAACTGGGCTGCGTTTACACTGAAAGAGCTATTTAC
CCAACGTTTACAATACTTGGGTGACCTGTTGAATGCAGGCTTGCCATTTAGAGTCAAAAAGAGCTTCC
TCAACAGTGTCCTTTGGGAAACACAGTGGAAGTATTTCACTGCTTCTACAGGGGAGAGGGTAGTGCCG
TTCAGACTGCAGAGTGAGGCCCTGAATTCCGGGGTGCCATTCAGCCCGAGCAAGGGGCAACATGCTG
GGCCCTGGCGCTGGAGGCGGTTTTGTCCCAGGCATAGATAAGGACTCAGCCCCTGCATCAGGAAGAG
GCCTGGCAGCACCGCCTGTCAATACATTTTGCCGCAGGTGACCTTGGTCAAGAATAAGGGTCTCTGCT
GATGGGAACTACTGTGAGGCCGGCAGCATCCACCCTGCGCTCACTGGGCTGGGTGGCCTACCCCACCC
AGACCCTCCCAGGGCAGTGGGCCCAGAGAGAGGATGAGGGAGGGCAGGTGTCCCAGGGGTTCTGCCC
AGCCAGCCTCTGGGATCAGGCCTGCAGTGTGGCTGAACACCAGAACTGAGTTTGGACACAGCCAGGT
GGCCCAGGCCAGTCCCAAGCCATGTATTTGGATGGAAAACATGGAAGTATTCAGGAGCCAGGCTCTGT
GTCCAAGGATGTGGAGGGAGCCTAAAAGGCGACAGAGAAGGGGACAGCTAACGGTGAAGAAGTGTA
GCTCCCACACTGCAGCCTAGGACAGTGAGAACCGGCATGCAGCCCAGGTGGCTGAGGGCTCTATGAA
GCCACAGTGGAGGGAGCCCAGAAGTGGGTTGTATGAATTGCGGGGCCTCCTGCTACCCGGGAGCTGC
AGCTATAGGAAGGAAGGAAGGAAGGAAGACCTCCAAGGAACTGTGTAGCAGAGGTGCAGTGCAAAG
AGAATTTTGATAAAAAATCCAGGAAAGCTCCAATACTTTCCCCCTTCCTTGCCTAACGGGCATGCAGG
CACTCCAATCCCCAGCCAAACAGGGCACTGGGCAAGGCCGGCCACCCATCTGGATGGGCAGCCTGAC
GACCAGATGGTCAGGGCAGTGAATGAAGCAGATCAAGGAAAGGTGTGTGAGGACCCCTGATTCCACC
TGCTTGGACCCCCACCTTCTGTGCTGCCTCCTGCTCCCAGAGTGGACTCTCTTGCCCTGGCCCTCAGGG
AGGAGACGGGATGAATGAAAACGGGGTCAGGACTGAGAGCTGCCTGCCGGCCTGGCAGGGAATGGG
AACTGGAGGAGGTTTTGCTCTGTGAAATAATGTCCCCTCTTTGGGTGAGCAAATGTCACCCACACTTGC
TCTAGGTCTCCCTGGGGCAGGGCTAACCTACTTGAGCCACAGGAAGGAGGCAGGGTCCCTGAAGAAG
CTTTTACTATCCACAAAGACATTTTAGGAGGCATTAAAACCATCTCTATCCTCTCCTCTCCACAGGAAG
TCTTGCAGCTGAAGGGAGGCACTCCTTGGCCTCCGCAGCCGATCACATGAAGGTGGTGCCAAGTCTCC
TGCTCTCCGTCCTCCTGGCACAGGTGTGGCTGGTACCCGGCTTGGCCCCCAGTCCTCAGTCGCCAGAGA
CCCCAGCCCCTCAGAACCAGACCAGCAGGGTAGTGCAGGCTCCCAAGGAGGAAGAGGAAGATGAGCA
GGAGGCCAGCGAGGAGAAGGCCAGTGAGGAAGAGAAAGCCTGGCTGATGGCCAGCAGGCAGCAGCT
TGCCAAGGAGACTTCAAACTTCGGATTCAGCCTGCTGCGAAAGATCTCCATGAGGCACGATGGCAACA
TGGTCTTCTCTCCATTTGGCATGTCCTTGGCCATGACAGGCTTGATGCTGGGGGCCACAGGGCCGACTG
AAACCCAGATCAAGAGAGGGCTCCACTTGCAGGCCCTGAAGCCCACCAAGCCCGGGCTCCTGCCTTCC
CTCTTTAAGGGACTCAGAGAGACCCTCTCCCGCAACCTGGAACTGGGCCTCACACAGGGGAGTTTTGC
CTTCATCCACAAGGATTTTGATGTCAAAGAGACTTTCTTCAATTTATCCAAGAGGTATTTTGATACAGA
GTGCGTGCCTATGAATTTTCGCAATGCCTCACAGGCCAAAAGGCTCATGAATCATTACATTAACAAAG
AGACTCGGGGGAAAATTCCCAAACTGTTTGATGAGATTAATCCTGAAACCAAATTAATTCTTGTGGAT
TACATCTTGTTCAAAGGTACTTTGATAATGTTCTGCTCTCCCAAGGCCACAGGGCCCTACGATTGTCTC
TCCCTTTCCTTTCGTTAGGCCAGCATATGATTAACGCTACGTGATTTTCTATGAATGTGTTTTCACGTTT
CAAAAACAGATTGATACACATATTGAACAGTGCCAGACGCTGTCATTTGAGGCCCTTCCCTGGTATCC
TATGTGCTTGTAGTCCTTATTATTTTCAGAGCACTCTACATAGCTCCCCTCTGACACTTAGAAGCATAG
GGTCTTTCCAAAAAACAGGGGGCTGGGGGATTATCTGGGGGATTTAGGATTGCATCATTGCTCCTTCA
TTTTTACTTTTTGACCAACTCTCTGCCCTTAGATTCCTATTATAGAAAATAGGGACACTCCACCTACTAC
AGTGTTAGAGGCTAAATGAGACAATGAATGTAAAGTGCCCAGATGGGCTTGGCACATAGCAGACACT
GAGTATCTATTGTTTACTTGTTCTTCCAAACTGCCAATCAGCAGGTAGAGCAGGAGTTGTCTCCTTTCT
AAAGATGAAACCAGCTCAGAGACGTTAGCTTGATCAAGGTCACACAGTAAGTGGCAGAGGCAAAACC
CAAACAAGGGCCTCCTGACCCCCTGATCCTAGGTTCTGTCCAGCCCTGCCTCCCTAATGGGGCACTGG
ACGTGGGTTGGATGCCACTTTCGCAGAGCTGGCACCAGACTTACAAAGCCCCGGCAGGGGAAGCCAC
TTTACAACCAGCCAGGCCACACCCCCAGGGCAGACGTTTATGTAGAGAGTAATGTACCTGCCTGCTAG
TAGCCTCTGCATTGTGGGGCCTTCTCTCAGAACCACACTAAACAGTGGGTGGGTGAGAAGTGTCACTC
CTGCCACCTTGGACTCTGCATGTGCTTGTGCCTGGTGTGAATGAGACAAAGTGGCAGTCAGAGGTGCC
AGGCAAAGGCTTTTCTCTAAGCTGGAGCCAACTATGAGGGAACGACTGTGAATTCCGTTCAGGTCCAG
GACAATGAGAGGAGCCAGGGATTGTTAGGAAACATTTCCCTGCTTTCGTGTGCGATTCCCAATAGGGC
CTGCGAGTGGAGCTGCATTTTGCTAGCTGGGCTAGAGGACGGGGAAAATTTTGGGGAAATTTATTTTG
CCTGCCTGAGCTGTGGAAAAGCCAACCCAATTAGGGAACGCCTTTCCTAGTTGGAACGAGAAGACGA
GAAGTGAGAGAAGTGAGATAGAAGGCTCCCTCTCTATTATTTGAGCAAGAACAATGCTTTTCAAAGAG
GGAATTTCTGCAATGAGTTCTTCTCTTACTTGTTCAGGGAAATGGTTGACCCCATTTGACCCTGTCTTC
ACCGAAGTCGACACTTTCCACCTGGACAAGTACAAGACCATTAAGGTGCCCATGATGTACGGTGCAGG
CAAGTTTGCCTCCACCTTTGACAAGAATTTTCGTTGTCATGTCCTCAAACTGCCCTACCAAGGAAATGC
CACCATGCTGGTGGTCCTCATGGAGAAAATGGGTGACCACCTCGCCCTTGAAGACTACCTGACCACAG
ACTTGGTGGAGACATGGCTCAGAAACATGAAAACCAGGTACAACTCTTGCCCACACCCTATACAAACT
CTACCTTTCTGTACTGGCAAACGCTCAGCACAATTTCATTGAATGCACCGTGATTTAATGTCTCCTCCA
GTGAGCTATAAGTTTCCTGAAGGCAGGGCAGCATTTGTCTTTTTTTCCACTCTATCCCCAGCATCTGTC
ACAGGGTGCCTGGCTGATTCATTCATTGAGTCCATCAGTATTTTACGTTCTGCGACTGTGATAAATATA
TGATGCCAGGGATCCATCAGCAAACAAAACAGGCAAAATTAGTCTGCCCTCATGCAGCTTACATTCTA
TTGAAGGAAGACAAAGAGTAAATTAAAAATAGGTAATAATGCAGGGAAGGGGACAAGAAGCATCAT
CAGGATGCAGATGGAGGTTAGACAAGGCCTCTCCAAGAAGGTAACAGTAAGCAAACATCTGAAGATG
AAGGATAAACCATGTGGATATATTCGGGGAGAGAAGTGTTATGTTACAGGCAGAAGTGTACAAGTTCT
GGGATGGGAGTGTACCTGGTGGGTTTGAAGAACATCAAGGAGACAAGTGTGGCTTCAGCAGTTGGAG
ATAAAATCAGAGAGGAAACAGGGGCCCAGTCCCCAGAAAAGACTTGGGCTTTCCTGAGAGAGGCAGG
AAGCCACTGGATGGTTCTGAGTAGAGGAGCAACCTGATTTTGACTTCTGTTTTTAAAGGATCACATAA
GCTCCTGTGTTGAGAAAAGACACTAGGGGGTAAGGATGGAAGCAAGGGAGAGTGGTTAGAAAGTTAC
TAGCAATCCAGGTAGAGATGCTGCTACCTGGACTGCGGTGGTGGTAGTGGAAGTGGTGAGAAGTGGC
TGGATTCTGGATCTATTAGGAAGTGCAGGATCTGCTAATCGATTGGATGTGGGTGAGAGAGGTGTCAA
AGGTGATCACAAAGTTTTTGGCCTTAGCAACTGGAAAGACGGATTTGCCATTTACTGAAAGGGGGAGG
AACAGGTCTGGGGTAAGTGCAGAAGTTCAGTCTTAAACACTTGGATCAGAAATATCTATTAGACATCC
AAGTTGAGATGTCAAGACGACAGGTGGATCTGGAGTCTAGGGTGAGGTCCAGGCCGGAGATATAAAT
TCGGTCATCAACACAGAACTAGAATCTAGACACATGACAGGGTTGGGGTCTGTAAATATAGAGGAGA
GGAAAAGAAAGCACAGAGTGGGCACTGAAATGTCTGCCCAATAAATTAATCCACCTATTGGAGTACA
AGGAAAATGGCTGCAATACGAATTCCATGGCTATGGCTTCTGAATCCTGTGACTCAGATTTTGGCAGA
CAAGTGCAGCTAAAGGTCCCCAGGGTTAGTTTTATCTTCATTATTCTTCTTTCATTTTTCTTCATATCTT
TAGCACCTAACAATGAACCCCAAACATCATAAGCCCTCAAGTAATGTTTGCTGAATGAATAACTTTTT
AAATTAATCTTCAAGACACGTCATGTCCTCAATTATTTTTAAATAAATAAAAAAATTTTATTTTGAGCC
ACAGAACTCATCTTTTCAAGCAACATATTTTCAAAGGAGGACTCCAGTATACAAAATAGATGGTATCA
GAGCTTCTCTGGCTAAAGACGGGTAGGGGTTGAAAGTTTTCTTTGCTCCCCTCCCCATCCATCCCCAGA
CTCCTCGGGTCTGCAGAATCCAGGAGCTGAAAACAGCCATCATCCAGGAGGCTGCAGGACTGCTGAA
AGCAGCTGTTAACTCAGGTTTTTTTTAAAATATAGGGAAATGAACACATAAGTACTTTGCTAAAGAAA
ACGTGAGTCACTGGCTGAGGAATAAAACTCATTCACTGAAGCTGAAGTACTATTTGATAAGCTAGAAA
TATTTTCCCTGAGTAGACCACTGTAAAAGAATGGCATGAACTACATAGTCAACTGAAAGACTCATTAA
TGGAAATAATCTTAAAGAACAAAAATTGTGACCTTTTTGGTGTCCACAGACTAGGGCTTTGTCTACATT
TCACCATCATCTGTTCTTGTACCACAGAAACATGGAAGTTTTCTTTCCGAAGTTCAAGCTAGATCAGAA
GTATGAGATGCATGAGCTGCTTAGGCAGATGGGAATCAGAAGAATCTTCTCACCCTTTGCTGACCTTA
GTGAACTCTCAGCTACTGGAAGAAATCTCCAAGTATCCAGGGTAAGTCAGGATCTTTCATCAGAGCCC
AACCTCAGCATGAAATGTCACCAAAACAAATGCTTTTACAAACCATTTAACTTTGATAAAATACCTAA
TTGTAGTGGAAAATTAGATTTAAGTCCCAAATACTTGAAATAGCACCCAGGTTGGATGTTTTAAGAAT
TTCAAGCAACTTCATTAAAATAACTTTTCAACTAATTTATTTTAAGCAGACCTCTCCCCCTCTGCTTAA
AGTGCTCAGGGAGAAATTTGACCCTGAAATAGAACTGGTTTACAGAGGCATCATCATTTATGTTGAAT
ACAACTTGAATAGTTCATGAAATTACACCACCTTTACAATGAAACAAACCCCTAGACATCATCTAGCC
CAACTTCTCCCTCCTTGTGGAAATCCCCTCCATAGCCCTACGAAATAGCCCTCCAACTTCTCTTCCTCTT
CATGCTTCCAGTGACATCAAACTCACCATTTCTTTGAAGAGCTGCCCAATCCACAAATAGCTAAAATT
GTTATATGTATATATATATATGTGTGTATATATATGTATATATGTATGTGTGTATAAATGTATATGTGTG
TATATGTGTGTGTGTATATATATATACACACACATATATATATATATGGAGAGAGACATACATATATAT
ATGGAGAGAGAGAGAGAGAGAGTCCTGTAACTTCTGATTCATACTTTTTGGTCCTAGTTCTATCTCTAA
AACTTCTAAGAACAAGTTTAGTCACCATCCACATAGAATCCCTTCAGTTACTCAGTGTTTCTCAGTGGA
AGGGTTCTTGGTTTTGAGGGGAACTGCTTGTTGTCCAGAGCAGTTGTGCATGTTGCAGGGAACTGGTT
AGCATTGCTGGCCCATGTTCACTAATGCCAGTAGGAAACTCCAGTCATCACTATAAAAATGCTCCCAC
ACATTTCCAAATGGCAGCTACATCTCTCTACATTCTTCCTTAGCTGTGTGGTTTAATATTTTCTTATACA
ATTGCAATTTTCAATTCCAAGAGAGACTAAAAATGGCATCCACTTAAGTAGGACACAGTAGGGTAACT
GTGGCCTGGAATCAGGTCTTACAACCTCAAGAGAGGTAAGACAATTAAATAAAACAATCCGTCAGAC
CAGCACCTGAAAGTGTTTCTGCTATGAACACATGAAAAACTGAAATGCGCTGCTGCTTTATGAAGGGT
CATCATGAAATTTAAACTGTAAATGATTAAATATTCTCCCTCTGTTTGCTCTGGGGAATTAATTTTCCTC
TAGGAAATCAGGGAATTTCCTGGAGTGAAAATCAGTGTAATTACATGTTATGTTTTCATTATCTCTTAT
AACACAGTAATTATATAGGTACATCACTCATATCACATCTTGTTTCTGTAAAAAAGGGCCTCCCAAAC
ATAGCAAGCAGCCACAGTATAGGCAGCCAGAATTCAGGAAGGCTCCAGGGACCCCTGGGCTTGGCCC
AGAAAAATGCCTCAGAGTAGTACCAGGTGCTGGGAAGCTGCTACAGAAGACTAGCCATTCCCTGCCTC
CACCTTGCCTGCCAAAAGGAAAGTCAGAGGACTCAAGGGATCCAGGGATCAAGGGATCCAGGCAGCT
TGAAAACCTTTTAGGAGCACCAGCTCAGCTCAAGAATTAGTAGCATAAATTACATGCTCAATAAAGAT
TTGATGCATGAGTGCATCCTGAGTCCATGCCCGGAATGTGTTTCACATATTCCACAATACTTCACATTG
GGTTCCTGAGGTCTCCTGGTATTGTTTAAGACTCCTGTGGCAGTCCCTGGTGCAACCCCAGACCACTCC
TCTTAACGTAGATGGGCCTGCTCCACTAAATCCCAGGAGCATGACCCCATGGGTAGGACCACTGTGAA
GAATTTCAAGGGGCTCATTTAATTCCTCCTTTGCACTGCCACACAAATGGTTTTTCACATTATTTCCTTT
TTCCAGGTTTTACAAAGAACAGTGATTGAAGTTGATGAAAGGGGCACTGAGGCAGTGGCAGGAATCTT
GTCAGAAATTACTGCTTATTCCATGCCTCCTGTCATCAAAGTGGACCGGCCATTTCATTTCATGATCTA
TGAAGAAACCTCTGGAATGCTTCTGTTTCTGGGCAGGGTGGTGAATCCGACTCTCCTATAATTCAGGA
CACGCATAAGCACTTCGTGCTGTAGTAGATGCTGAATCTGAGGTATCAAACACACACAGGATACCAGC
AATGGATGGCAGGGGAGAGTGTTCCTTTTGTTCTTAACTAGTTTAGGGTGTTCTCAAATAAATACAGTA
GTCCCCACTTATCTGAGGGGGATACATTCAAAGACCCCCAGCAGATGCCTGAAACGGTGGACAGTGCT
GAACCTTATATATATTTTTTCCTACACATACATACCTATGATAAAGTTTAATTTATAAATTAGGCACAG
TAAGAGATTAACAATAATAACAACATTAAGTAAAATGAGTTACTTGAATGCAAGCACTGCAATACCAT
AACAGTCAAACTGATTATAGAGAAGGCTACTAAGTGACTCATGGGCGAGGAGCATAGACAGTGTGGA
GACATTGGGCAAGGGGAGAATTCACATCCTGGGTGGGACAGAGCAGGACAATGCAAGATTCCATCCC
ACTACTCAGAATGGCATGCTGCTTAAGACTTTTAGATTGTTTATTTCTGGAATTTTTCATTTAATGTTTT
TGGACCATGGTTGACCATGGTTAACTGAGACTGCAGAAAGCAAAACCATGGATAAGGGAGGACTACT
ACAAAAGCATTAAATTGATACATATTTTTTAAGATGTTTGTGCAATCTGTCTGGTATTTTAAGCTTGTTT
CTAAGAACCTTAGTTACTTGGCTAAAGACTAGCTGGGTAGAATATCTTTTCTCTGTTGCTCACATATTT
TCATTTTTAAAAAGTTGCAGATGAGAACACTATGTCAAGATAAAGCCTTTGGGAGGAACACATGTAAA
CATTCTCCTTGAGTCATGTGCTTCTCTCTCTTTCCTTCTCTCTGGTGCAAAATAAGTGTTTTATTTTAATC
TATTACGGAGTCATTTCTTGCTGACTGACATCAGAAGAAAATAGCTCTAACCAGTCCTGATCACAGCA
TCTGCTTCCATGGTGCATCAAATCGCTTGGCAGAGGCATTGGCTGAATCACAGATCATCTAGTTCAATA
CCTTCATTTTACAAAGGAAAGAAAGAGGGACCCAGAAACAGGTCCATATTCTTACTTTCATGGGCCCT
AGGCACGTTTAACCTTGTAGACTCCTCCTTCCTTCATGAAGATATATATGTTCTATGGCTGCATTGGTA
GAAAGATGAATATATTCGTCTTTCAAAGTTGCATATCTAGCTTCAAAGTTATATGTCTAGCATATGGCA
ATAAGCAAAACACCTTCATGGGCCCTTACAGTACTGTCAGCCTTGGGCACTGTGTCTTCTGCATCTAGT
GGATAAGTCATACCTTATATACCAGTGGGAACAAAATACTTGTCCAAGGTCTTCCAGTGTGGCAATGG
CAGAGTCAGAAGCCTACCTTTCCTGAGTCTAGTCTCCAAGCCCTTTTTACTCTTCCTTCCATCTAAAAC
ATCTGATGGGGACCAGGTAAACAGCATGCACTACAGCTACCCATGGGGGTTAAACAGAATATAAGCA
TGAACTTTGTCCCAGGGTGAAAAGGAAAATCGTAAATATCCCTGATCTTCCTTAGGCAGTTATTTTCTG
TCACAGAAACAGAAAAGACTATATTCAGAGAATCCTGAATAGAGCTGATTTACAGTGTGAACTATGTT
AACTAAATGCCTAATTGGATTTCTGTCTGTCTGCTATCTAATGTTTAAAAAAACCTAAAATTCATTTAT
TGATTAGTTGTTTAATATAATTCAGAGTAATGTGAATAGGTAATAATATTAATATGCAGTCTAAATACT
GACTTTTCATCATTCCATAACCTGGACTGATGAAAAGTCAGTATTTAGACTGCATATTAATAAAATAA
AATTCATTCCTGTATTCATTCCAAGAGTACTAATTGACACTTATGAAGGGACAGGCAATTCTAGGCCCT
AGAGGGCCAAAGACAGAGGACTAACTCTATCTGACATTCTTAAGTCACCTTGTTTGTGTTCAATTAGTC
AGATTTGTTTGTGGAAAAATAGTAGAAAGAGGAATAAAGTAGCATCCAGTCCAATTTCCCACTTTTAA
GAGATGAAATCTGGAAAAATAAGTCTGTGAGAGCACAATACTCACTGAAATCAATATGGCCAAACCC
AGTAATAAAAAGGTACATTATTATTGAAGGATTCATATAGCATGCAGATAAAAAACTCCTGCCTTCTT
CCCACCACATACACTGCAAAGCAACAACAGCATAATAATTGTATTTAATATACTACTCTTTAAGGTAG
AAAATGGACCTATTCTATATTTTAAATATACTTTTTAATGTTCCCTCACATTTGCTTTAAGAAGTTCCTA
AGACACTCAGTTTCAGATTTCCCAAGTACACAGGCATGACAGAAAAACGCAGACCAATAAAAAATGT
AACTTACCTTACACAAATACATACACACAAATTCAGGGTTTCCAACCGAGCGGGGGAAATCTTAACAT
TGTAGAAGTCTTCACTATATATGTGTCGAGTTTTTGTTTTTGTTTTTGTTTTTGTTTTGAGACAGAGTCTT
GCTCTGTCACCCAGGCTGGAGTGCAGTGGTGCGATCTCAGCTCACTGCAACCTCCACCTCCCGGGTTC
GTGCCATTCTCCTGCCTCAGCCTCCCGAGTAGCTGGGACTACAGGCACCTGCCACCACGACCGGCTAA
TTTTTTGTATTTTAAGTAGAGATGGGGTTTCACTGTGTTAGTCAGGATGGTCTTGATCTCCTGACCTTGT
GATCTGCCCGCCTCGGCCTCCCAAAGTGCTGGGATTACAGGCATGAGCCACCACGCCCGGCCAAGTGT
CGAGTCTTAAAAATTGTTCCTACACAGACACACTCAACCACACGTTCTCACATATATATGCTGTAACA
ACTGAGAACAGGTTACTGACTTAATCTAATTCATTCTATCTTCATTGTAAAACTTCCACTCCAGCTGAA
GAGCCTGTTTCATTTCAATTCAAAGATTTCTCATATATCCACTAATTGTATGGCAAAACTGACTCATCT
CCAGACTAAGATATTCAAGCTCAGGAAGTCAAATAATAGAAATGATTTTTTAAATGTGTAAGAGGTTA
TAAAGAAAAACTTTATGTGCTCCTTATTTAACCTCTATTAAGTAAAATCCTTTATAGACCTATCTCCAT
TTCTGCAGTAAAAGTGAGCTCTACAGTTAGCTTGTAAGGCTAACTAGTGAAATTCCTGGACTTGTTCTT
AAAAATGCAAGTTTTAGTAATTAACAAAATGATGATGAAGATGTCCCTTTTCCCTACAACTACAGATG
GAGGGAGATTTTTCTTTGCCATACAACTAGCTTAAAGGATTAATTTGATAAGTTGTTAAACTGAGAACT
TTCACAAAAGTATCCATCTTGTTTTTGATATAAATGGAGATACATGTAGTTATTCATAACTGTCAGTAA
TTTGCTGTTTATCCTGTTTCTATATATCTGTCCTTGAGAGTATAATTTTAATAAATATTTCAAAGATTTT
AGGAAATGTCATGTTCTGTTAAAAAACTTCCAAAAGTAATTTTGATGAACAGTTTTGATAACTTAGTAC
TAACTAGGACTAAGACTGCAATTGACTGCTCTACATTCCTGAACTTTATAAGCAGTAGTTGTTTCTCTC
TGTCAAATCAGTGTCCCCTTTTCCCATTTGCATCATGGGAAAGTGAAACCTTATAATTCTGCTAAATTT
ATTATAACAAATACATTGAAATTCTCCATTTTATTAAATTAATAGAATGTTATGAATCAAAGCACCAA
AAAAACTGATGCAATTTTGATGTCTCGTTCTGTACCACATTCTCCAGATCTTAATATATTCAGTTCCAC
ATTATTGGTGCTAGTAGGAGACATAATGAAAACAGTTAAATGAAATCCACAGCGAGTATACTGATTAA
CCAGTACTGTCAAATTTCTCATACCTATTGAATTTTAACTACTGACAAAATGAGCAGTAACAATTCCAT
TTACCTGATTGTCCTTTGGCAAAGGATATTATTAAGAATCACTAAAAATAGCCATAAAGAAGCCATAT
GGAAGGAAGAAGGAAAACAAATGGCATGAAAAGGTCTCTCACTGAGTAACTATGCTCTTATAGTTGA
CGCTGGTATATTTCTTTTATTCACTACCTAAAAATGAACTATCTTACTCTTTAATTATAGAATAAAAAC
TGCAGGAAAGTATTTAAGACTTTTTTTCACAAACACAGGTATCTCATTAACCTATGTTTTATTTTGAGT
AAATTCATTATTCATTATTTCACATTATAAAAAGTAACCACACATACATATGCATTCACAAATTAGATC
ATCTTTATCATACATCAATATATTTTAAAAAACAAATATCTTCTAATATCAATATAGTTATATGCTGAT
TGCATTTTGAAATAGAGAAGCTGACAATAGCTTCACACGGTATATCTCAAGAACTGACAGTTTAAAAT
TAAGAACTGTATATATTCCACAGGCAAATTTTGATGGAAATATTAGCATTAGTACAAATAAATGCTGT
TGACATAGCTTAAGCATGATAGCTTGGAATAACAGCTGATTCAGACTAGATTCATCATTTTAAATAAA
GACAAGTACAATCTAAAATGTAAACAAAGTATTTATAAAATAAATTCTCTAGGAAATAAAGAAAATC
ATCAATCTATTATTTTTAAGGTATTTATAGCTCAAAGTTACCAGAAATCTTTGTGGAATTTTCACTGCC
AAATTTAAATTTGGGAATGTCCGGGTACAACATATTGTCACCACAATCCGGAGGGCCGCCAAAATCGC
AGACGGCTATTTGCATCCTTTCAGTGTGACTTTTCAAGTGGGCTTGGAGACTCATGAGAAAATGCAGT
ATCTTTCTCACCTTCCAAGTCCCCCTCCAAGTGCTTATCAAGCTAGGACAATTCAGCTGATGTAGACTT
TCATACGATTTTTAAATGCTAAAACTCTAGAACAATTAAATGGCTGGTTTCCTGCACAAATAAATGCA
GACTTGTCTCTTTTGCAGCAGTGGTTAAAGCACATTCCTAGAGATGTTTTTCATTACACTTCACTATAA
CATTGGAATTCCGTAACCACATTATTACTCAAGAAATATATATTATACCTCCTAGGGAATCTAATTTGA
AATATGAAAAGTTTAACATCAGCTGTCATTATGTCTCTCTTTCTGCTCATTAACAACAACAAAAAAAA
AAACCCAAAATTTAAAAACAAAGCCCCAGCCACTGCTTTAGCTTTTGTGTACCAATCACATTATCTCCT
GCTGCCTTTGTTTTGCCTCCTTCATCAAGCAGTTGATTTAAGGATTGGATTTTCTGGATTTTCTTTGGGA
AGAAAGAAATGAAGGAAGAGAGGGAGGGTGGGGAAGGAGGGAGTGAGAAAGGGAGAAAAAGAAAA
AAATATGAAAAATGTTATTCATATAATGTGTACAAAGTAAATTAAAAATATATAGATACTCTACTTTG
AATAATTCTAATATATGAGAAGT
(B4GALT1)
SEQ ID NO: 485
GAGGCATGAAGAAATAATTGTGCATGACTGAGGACTTTCCAGACCTCCCCTTTCCTTCCACCAGTTACT
TACTAATCTCAGAATCCACCCCCCAAAATTTTTCTGATAAAAACACTACCTTAAAGCCAGCCCAGGGA
GACTTGAGCCAGCCCAGGGAGACCTAAAGTCACCACAGGGAGATTTCAGCTGGACTCTTCTATCTCCT
TGTTGGCCTACCTGCAGTACAAAGCTTTTCTTTTCTCAAAAACCAGGTGTCACAGTATTGGTTTCTAGA
ACATTGGGCAGTGAGTGCTTTTGCGCTTTGGTCGGTAACACCTGGATCTGATTTAGACAATACTTTGGA
CCTGAAGTCTTAATTAGTTGAACTTTTGGGGGATTTTAAGAAGACACTAATGTATTTTACCTGTGAGAA
GAATCTAAATAATCTGTGGCCATTGGGCAAACTACTGTGGAATAAAGGTGCCTGACAATTCTTTGTCC
CTCCTCCCATCAAGAGGTGGAGTCAGCCAGGTGAAATGGCTCATGCTGGTAATCTCAGCACTTTGGGA
GGCCAAAGCAGGAAGACTGCGTGAGCTCAGGAGTTCGAGACTAGCCTGAGCAATATCGCAACATCTC
ATCTCTACTAAAAATTTTAAAATTAGCTGGACGTGGAGGCGCATCCCGGTAGTCCCAGCTACTCGGGA
GGCTGAGGCAGGAGAATCACTTGAGCCCAGGAGTTTGACGTTATAGTGACCTATGATCACACCACTGC
ACTACAGGCTGGTTGATAAAGGAAGATCCTGTCTAAAAAAAAAAGTAAAAACAAGAGGCCGAGCCAG
TTTTATTCCCCTTGAATCTGGCCTGCCCTATAAACTTGTTTTAAGCAAAAGAATGCTTTAGAAGTGATG
CTAAGGCTGGGCTTTCAGGGATCTCCATCTTCTGTATTTTTGAAATGCTCCTTTTTGGAATGCTTCCTCT
AGTTTGTGAGGAAACCCAAGCAGCCACATGGAGAGTCCTTTGTGGAGAGATCCAAGTGGAGAATGAA
GGCCCCATGACCCAACCCATTCTGAGTTTCCAGCCCCCAGACAGCCCCAACTGCCATTCACATGAGTG
AAGCCATTTTGGAACTTCCAACTGTGCCAGTGCCTCAGCTGACACCATGTGAGGCAAAGCTGCCCAGC
CAACTGCAAAACTGCGAGAAATTGTTGCTTCAAAACAGTAAGTTTTGGGGTAGGTGTTACGCTGCAAT
AGATGACTGAAATAACTGTCTACCATGTGCCGGGCACTATTTGATGCCCTTCTGATCCATGAGGGTAA
AAACAGAAATGTAACCTGGCAGGTGCAGAAGAGGGCGCCATAGGAGGGCAGAGGAAGGCCAGCTGC
AGGGAGAAGCAGGGAGCTGGTGATTCTGGGCAGATGAGCACATGGATGGGCCAACGGCCAAGCCCCC
ATGCCAGCTTTTGGCCAATCAGCACTGCAACTTCCTCCTGCATTTGTCTCGCCGGATGGGATTAATTTT
TCACCTGACGAAGTAGAGAGTGGAAAAGAGCTGGAGACAGTGGGGAGAAAGGTTGCCTGGGTCTGTC
TCACTAGCACCAGTTAATGTCTGGACTGCTGGACAATGTTGTCCCAAAGGTTTCTGGGCCATCTGTATT
ATTTGTAATTGACTGCTTCTAGGTGCCTGTGGATCAGGGGCAGCTGAGACTAGTGCTCAGGCCTCAGT
GGACTCTGCAAGTTCCTGAGGGATAGGCAATCAGCAAGTGTTGTTCCTTTTCCTCGATTTCTGGCCACG
TGTGTCCTGGGACAGGTCTGTGATTCTTAATAACCCCCGCAGTCCTGTCTCCTGGCTATCATCTATACC
AATGGAAGACACATCCCCATTTCCCCCTCCACTTAATTTTCAGTTGCAGGACTAATCTGACCCACCCTC
ACTCATTGGCCAGGCCGACTTTACCCCTAGACACAGGATGCTGGGGTCAGCTTCACCTTTACCAACTCC
TTGGAGAACTCCACTTTACGTTCTAAACTAAGTTAGCAATAATTTTTCCCTTCTCTCCTTCCCACATCAT
TAAGATGATCACAGTATTTAAAAAGTATTTTAACAAATATCGGCCGGGCACGGTGGCTCACAACTGTA
ATCCCAGCACTTTGGGAGGCCGAGGCAGGCAGATCACGAGGTCAAAAGATTGAGACCATTCTGGATA
ACACGGTGAAACCCCATCTCTACTAAAAATACAAACAAATTAGCCGGGCATGGTGGCAGGCACCTGT
AGTCCCAGCTACTTGGGAGGCTGAGGCAGGAGAATGGCGTGAACCCAGGAGGCAGAGCTTGCAGTGA
GCCAAGATCACGCCACTGCACTCCAGCCTGGGTGACAGAGTGAGACTCCGTCTCAAAAAAAAAAAAA
AAAAAATCTAGGGGCTGAAGATACAGTAGTGAACAAGAGAGAAATTTCCTGTTCTCATGAAGCTGATT
TTCTAATGAGGGAGGCAAGACAACAGAAAATAAATGCATAATGTTGGGTAGTTGATATCCACTCTGAA
AAAAATCAAGCAGGTTAAGGCCGGGCGCGGTGGCTCACGCCTGTAATCCCAGCACTTTGGGAGGCCG
AGGCGGGCGGATCACCTGAGGTCAGGAGTTTGAAACCAGCCTGGCCAACATGGTGAAATCCGTCTCTA
CTAAAAACACAAAAAATTAGCCCGGCGTGATGGCAGGCACCTGTAATCCCAGCTACTCAAGAGGCTG
AGGCAGGAGAATCGCTTGAACCCGGGAGGCAGAGGTTGCAGTGAGGTGAGATTGCACCATTGCACTC
CAACCTGGGGGACAAAAGCAAGACTTTGTCTCAAAAAAAAAAAAAAAAAAATTCAAGCAGTTTAAGC
AGATTTGGGCAGGAGGCCATTCTGCATAAGGTAGTCTGAAAAGGTCTCTGTCATAAGGTGACATTTAA
GAGACCTGAATTGAATGAAATATTGGGGACAAGTGTTTCAGGCTAAATGAACAGCAAGTACAAAGGC
CCTGAGGCAGGAAGAAATATGGCAAGTTCAAGGAATAGCTATCAGGCTAGTGTGGCTAAGGCAGGTC
CAGCATGGTAGAGTGACAGATGTGGGTGGGGAGGGAAATAGGAACCAGATTGAACAGGGTTTCTGTG
GATTTGGTTCTGAACAAAATGGCATGATCTGATTTATGCTTACAAAGATTTCCTGGATGCTCTGTGGAA
AACAGACTAGGGAGGAGGAATGGAGGAGGTGGAAGCAGGGTGACCAATTAGTAGCTGCCATATAACC
CAGGGCAAGATGATGGTGGCTTGATCGAGGATGGTTACATCAGAGTTGGCTGGTGGTGAATTTTGATG
TTTTGAAGGTAGCACTGACAAAGCTGGCTGAGGGCTTGCAAATGGCATTGAGAGCAAGAGAAGCACA
TCAAGGACACCTTTTAGATTCTGGGGAACTGAATAAACAATAGTATCACTCTCTGAGGGAGGTAAGAA
CGGGAGTGGTGTGTAAGGAGTAGGTTGCTGAGGGCAAGATGTATTGTGTTTGAGATGCCAGTAAAATA
AGCAGTTGAATCTGGAGGTCAGGGAAGAGATCTGGGCTGGAGACAAATCAGTGATCAGCATTTGGAT
ATTATAAATCATTCCGAGGCAGTAAGTGTAGACACAAAAGAACATCATGGACTATGGCTGGGGCCTTC
AGCAACTGGGGAAGAAGTCCAGAGAGGAGACAGAAATGGCCAGTGAAGTGAGGAAGATCAGAAGGA
CCTGGTGTCCAGGAAGTCAAGTGAGGAAAGTTGATTCTGTATGATCACAACCAAAGTGTCAACTCATA
AGCCTTATTTTCTCATCTGTGAAATGGACACCGTAACACCACCTACTTCATGGCAGATAGTACTGGCAC
ACAGCAAACTCTCAAAATAAGGTAGCTACTGTTATTCCCTGATGGTTGGCTGCCAGAGCCCTCAACTT
CCCTATCCACATTACTGACAGCACCTCCATGAGTCTTTCTCTGGGGTGAGGTGTCTCTGCTCACTCAGG
GCCTGAGGCCTCTGGGTCAAATCGAGGTCAAGTGGCTTCAGTGCCTAAGTCTCTCACCCACACAGCCT
TCAGCCCTTACTTGCAAATCAACAAAGGGTAAACCTGTAGAAAACATGGGTTTCGGAGCCAGAATTCT
GCCTCTTGCCAGCTGTGGGCTCTTAGGAAAGTTTCTTAATCTGCCGGGGCCCCACTCTACGACATGGGG
AGAACTGCTACTTCATGGGACAGTGGGTAGCCCAGTGTAGACTGTAACGCCGGCTGATCTCCTGCACG
CTGGCCTGGGAGTTAGAGGCTTCTTGCTGCTCTCCTCTTCAAAGTATACAGGACTCCCGCCACACACAC
ATCTGGAACCAAGCTGGTCTGAGAGCCCCTTATAGCCCAGGCTACCTGATGGGGAGGCACAGAAGTG
GCAACCCGTCCACTTTCTTTGCCGCAGGACCCCCCGTTAAGCAGCGGGGTCCAGCCGGGCTGAGTTAG
GGAGGGGGTTTCGAACGTGCCACTCCTCGCCCGGCGTCGAAGCCCGTTTCCTGGGTAACCTTTTTCTGC
CTCTCTTCCTAGCCCACCAAGGCCCACTGGCCAGAACGCCGCCGCGGCCCCAAACCACTCCAGATAAC
CACCCGCCAGCTGTCCTCTCCGTTCTCTCCGCCGCCGCGCTGCAGGCCCAGGCTCGCACCCGAGTCCCT
TCGCACCCCAGGAAGTGGCGCGGCCTGTCGAGGGCAGCGTGGAGGAGGAAGAGGAGGCGCGGCTCA
ACGCGACCGAAGCTCCGCCGCAAAGGCTCGGGAGGAAGAGGGCGGTGCGCGGCCAAGCGTCGGAGCT
GCAGTCATACTCCGGGGACCCCACGACGGCGCCCCGCCCGCTGCCCACCCTCCCGAGGCCCCGCCCAG
CGCGCCCATCCCGCCACGGGCTGCCCCGCCTTCCCGCCCTCGTCCAGAAAACCCCGCGCCCGGCCCCG
CCCCCGCCTTCGCCGGGGCCCCGCCCCTCCCCTCTCCGCCGGCGCCTCGGGCGGCTTCTCGCCGCTCCC
AGGTCTGGCTGGCTGGAGGAGTCTCAGCTCTCAGCCGCTCGCCCGCCCCCGCTCCGGGCCCTCCCCTA
GTCGCCGCTGTGGGGCAGCGCCTGGCGGGCGGCCCGCGGGCGGGTCGCCTCCCCTCCTGTAGCCCACA
CCCTTCTTAAAGCGGCGGCGGGAAGATGAGGCTTCGGGAGCCGCTCCTGAGCGGCAGCGCCGCGATG
CCAGGCGCGTCCCTACAGCGGGCCTGCCGCCTGCTCGTGGCCGTCTGCGCTCTGCACCTTGGCGTCACC
CTCGTTTACTACCTGGCTGGCCGCGACCTGAGCCGCCTGCCCCAACTGGTCGGAGTCTCCACACCGCTG
CAGGGCGGCTCGAACAGTGCCGCCGCCATCGGGCAGTCCTCCGGGGAGCTCCGGACCGGAGGGGCCC
GGCCGCCGCCTCCTCTAGGCGCCTCCTCCCAGCCGCGCCCGGGTGGCGACTCCAGCCCAGTCGTGGAT
TCTGGCCCTGGCCCCGCTAGCAACTTGACCTCGGTCCCAGTGCCCCACACCACCGCACTGTCGCTGCCC
GCCTGCCCTGAGGAGTCCCCGCTGCTTGGTAAGGACTCGGGTCGGCGCCAGTCGGAGGATTGGGACCC
CCCCGGATTTCCCCGACAGGGTCCCCCAGACATTCCCTCAGGCTGGCTCTTCTACGACAGCCAGCCTCC
CTCTTCTGGATCAGAGTTTTAAATCCCAGACAGAGGCTTGGGACTGGATGGGAGAGAAGGTTTGCGAG
GTGGGTCCCTGGGGAGTCCTGTTGGAGGCGTGGGGCCGGGACCGCACAGGGAAGTCCCGAGGCCCCT
CTAGCCCCAGAACCAGAGAAGGCCTTGGAGACTTCCCTGCTGTGGCCCGAGGCTCAGGAAGTTTTGGA
GTTTGGGTCTGCTTAGGGCTTCGAGCAGCCTTGCACTGAGAACTCTGGTAGGGACCTCGAGTAATCCA
CTCCCTTTTGGGGACTGACGTGAGGCTCCCGGTGGGGAAGGAGACTGACCTCTCGGTTCACGTGTCTT
GCCATAGAGCCACTCTCCTGAGTGGGTTTTTCTCCTGATCGTTTGGGCCAAGTGACTTCTCTCTGAACC
TCATATTTCTCTTCTGGGATAATAAATGGTCACCCTTTCAAGGGGTTGTTTTGGAAGATATTGTGAACA
ATGGTAAATAAGGGCTTAATTAATGAGGGTAAGCCCTCAGTAAATTGTCACTGTGTGTTCATTTCTTCC
TCTGTGTGGATCGTGACCGAGAGCCCTTCCCCCTAGCCTCCTCCTGGTATGGGTACCCAAAACCTAGGT
GAGCAGGGATCTCTCCCAGGGGCAGAGAGCTTGTGTACTCTGGGTGTTAGAGGGCTAAAATATAACCA
GTCAACACCACGTTGCCCATTTCTGGTACTTCCGGTAGCAGCCTGAGTCTCAATTATCTTGCCCAGATG
ATCTGAACTCTGACCTCTAGCCTGTTTCAGCATAGGCAGAGAGCTTGAGTAGGTGAGTTTGCATTCCTC
ATAGCAGCTGGCTGAGCCTAGTCTGGACTTCTCTTTGACCTGTAACCTACAGGCCCACAGGCCCAAGG
CAACCACAGGTTGCTTCCAGGGTTACCACACAGGTGGTTTCTCATTTCTAATGCTAGGTTTTAGATAAT
TGTTGTAAGTGAGGGGCCCTGGCAGGCAGGATGACATCCTGCCAATAGGAGTTTTCTGTCACTTTCCC
ACAGAGCCCTGGCTACTACATACTCTTGCTCAATTTCGCCAGTAATTGCGTCAATGTGTTCATATCAAG
TTTGGGAAGAACATCTTGGAATTGGTCAGACGTGAACTGTGGTAATAATGGGGGCTTGTTTTTTTAAG
CAGATAATTAAATTCCTTTGCATTTGATGATTATTCTGGGAAGCAGACTAGTCCCATAAAATGAAATG
GACTCTGCCTTGCTGCTAAGTGTCTGACTTGAGACATGCTATCGAGTTTCTCAAAATCTCTTCCTTGTGT
AAAATGTGGTTGTCGATGATTACCTTACAGGGGTTTTTTTAAGACTAAATGAGATCGTGTACATTAAAT
ACAGGCACTCAGGCTGGGCATGGTGGCTCACGCCTGTAATCCTAGCACTTTGGGAGGCTGAGGGGAGT
GGATCACTTGAGGTTAGGAGTTTGAGACCAGCCTGGCCAATATGGTGAAACACCATCCCATCTCTACA
AAAATACAAAAAAGTTAGCCAGGGGTGGTGGCATCGCAGCTACTCAGGAGGCCGAGGCAGGAGAATT
GCTTGAACCTGGGAGGCAGAGGTTGCAGTGAGTCAAGATTGTGCCAGTACACTCCAGCCTGGGCGAC
GAAGCAAGACTGTCTAAAAAAAAAAAAAAAAAAAAAAATACGGGCACTCAATACACCGTATAATAAT
AATATAGTAATAATATTTGCTTAGGATCTTTAAAAAGTTTCATTTTTTCAGACTCCCACAGAAATGGCT
CTGCACAGCAGAGTGAAGGGGGAGAGAGACTGAGTCTCCAGGCCAGAAAAAGGCCAGGTTTTTTGCT
TTTGTTTTTAGTTGTTGCCTGGATATTGCACAGAAAGAAAAAATAATTAGCAAGTTAAACAAAAGTAC
CGCAAAGTTGATTACATTGGTATTTGAGTATCACATCTTCTCTCAGAAGCGTAAGAGACAAGGTCGTG
ACCATACCTCTGCTTAGTTTTGTTTTGTAATGGTGTTGCTAGTGATCGGCTTGTCACCAGTTACTGGTGT
TTCTAAATGGACTATAATTGGCTACTTGAAAGGACTTCCTGAGAAAGAACATTTTGGAGGACGAGGAG
AGAGTGCCTTCTCTATTTTGGCTGCTTTCATGTGACATGCAAGAGACCATGACGTTTAGGCTGCTGCTG
AGGCAGCCCCAGAAATGGGGGCCGAGAGGTCTTTTCTTCATTTTAATAGGGTCTGTAGGTTTGGGTGG
TTAGGTACAGTTCTCAGAATGGAGGTTCCTGGCTATGAGGCCTTGAGAAAGCTGAAAGTCTCCTTGGG
AGTGTGTGGGTGGGGGGAGTCGAGCCCATCTGTTCATGGGCAGGTGTCAGCCAAAGCCCTTGCGGGTG
GTTTTGAGGTTGGTGGGAGAAAGCATCCGTGGGGTTTAGAGTTGTGGCCTTTTCACTACTTGCAGTTCC
TTTCCCCGACTTGGCTTTACTTTCTGGTGTCCAGGGGTCTGGGCCAGATGCTGAGATTCCTCTCAGCTG
ACAGGTGTGGGTTATGGGCAAACCCTTCCCTGGAGGACATAAGGCACCGGATTGGACTGCTGATGGGT
TGCTGTTGGAGTTGTCAGGGCCTTGGAATAGTCTTCAGATAGACTTGGGTTAGTGTGACCTGGGGCAG
GCTGCAGGTTTGGAGCCATAGTACCCCCCGCCCCCACACCGGGCACCCTGCTCTGGGCTAATGTGAGG
CTTGCAGGAGTGAGTGATGCAGTGGGAAGGGGGGCCTTTCCTGAGGATTCTACAGCTTTCTCCAGGGA
ATCCTCCCAGGTAGTTTAGGCCTGCAGGTGCTATGCTATCCTTCTTTCCTAACCCTGTCTCAGGTCCTCA
GCGGGGCCATGCGGCATCCACTTATAACCCTGCAGCGAGGCCCTCTTTTCTGGCCACCTGGGTGTTTGC
CTGCTGAGATGGGAGGAACAGTGGCCTTGGGCTTCTTCCCCCGTCATGTTTATCTCTGCTCAGATTGGG
CAGCAGCTCAATGGGACTTGACCAGCTGTGGCACTGCCAGTCTGAAGATGAGTAGGGTGATGGGGGG
AGGTGGGCAGTACCTGAAGCTGAACTGGTGAGAGAGGCAGGCTGGCCTGGGGGCTCAGCTGGGGCCT
GGGATGGTTGGTACAGTCCCCTCAGGGGGGTAGGGGAGTGAGTGTTAGACTGCTTAAGCCTCAGAGG
CCGCTCTTGCCCACCTATGCTTTGAGGAGATCCTCTTCATTTGTTCAAAGGGAAGACTCTGATCTAGAG
ATGGGCACTTGGACCAGCAAACAGCAGCTACAGGTAGCCAGGGCACCCGAGGAGCACTTGCTCATGA
GCCGGTTTCCCTGGTTTTTATGGGGGCTGTTGCTGAGCGTCTGCCAGGGTTTGTGTCCTAGCACTTGCT
GGTCTTTGCTGGGCTCTCAGCTCTCAGGTGTTTCTCTACCAGCACGTTTCCCCCTCCCTCATATGCACAC
ATGTGGACACAAGCAGGCTGCCCAGGACAGAGTGTACTTTGAGGCTTGGGAAAGGACTCTCTCTCGCC
CTTTTGGGGATGAGCCTTGGAACCTCATCACCTTCCGGCTTGGGGTGGAGCTTCATCCTGGGGGTTGAA
GCTTTAGGCTCAGATAACTAGTCTTGTAAGCCAGTTTTGTCCTGTTGTTTTTTTCGTGGAAAATAATGT
ATTGACGTATACACAGACATTCTTTGTCTAACAGTCTGAGATTGAGAAATACCCTCCATGACTATTTGG
TTTGCTTTCATGGTGAAACTTGGTCGCTTTCTTAGACACAGCCTATGGCAATAAGAGTGATCCCTGGCT
GCTGTAATTCATTCCAGACTTTGAGCAAACACAAGGCACCGCCTCCACCTGCAGTGGAGCCTCTGATG
AACCAAATGGAAACTCCTTGGGGAATGGGGAGTAAGAGCCAAATGTGGGATTGGACTTAAACTGCAG
CTTCTTAGAACTGTAGCATTCCACGATGGGATTGTCTAGTGCTCTTCCTGGAGGTTACTATTCAATAGT
TGGCTAGTGCACAGGTTCAGGGGTGACCTGATATGCCCTAGCGTTTCAGAAGATCCCTGCAAGGTGTG
TCTTTTGGTCCATCTGAAGGGTCTTGTATGGTGATCTTGTATGGATATCCGTGACGGCTAAGGCATCTG
ATAACTTCATTCCTTCAGTTCCAGCAGTGTTCCTGTATTATGCTGGGCACTAGAGCTACAAAGAAGAA
AACAAAGTGCCTCCTCTTCAGGAACTCTTAATTTAGGCAGGGGAGGCATAATTGAACAGTGCTGAGGT
CATCTAGGGGAACCAAAGTGTGTATTTATCCCCTTCCCTATCACTCCCCTCCCTCCTTCATTTCTTCCTT
TCTTCTTTCAGAAACTCCAAGTTCATATCAAAATTCTCCAGCCCTGGTTTTATTTGGTTGTGTGAAAATT
TTCCTCTAATTTCTGAAGCTATGCATTAGTTCTGCTGAGTAATCTTTAACTTGCTGCTTTATAATGATTA
TAATGAGATATCACTGGGTATTATGGTCTTTGGGTAGCAGCAGGGTAGGGATTTCCAGGCTGGGACTA
AGCTAATTTATGGGTTGGGAATTATGGGGCAGTTAATAGCAAGGCAGTCCAAGCTTTCCACAGATTCC
ACCCTAGGGACCATCCAGACTTAAGGAACAGGGCCGGCAGGCTCATCCCCTTTGCACTCAGCTGGGCT
ATGGGTGTGTGTTTGTGAAAGAGGTTTATTCAGTAGTCATACCTGCTGATTTCCCTGCTATCTGTTTAC
CCAGTGCCTCCTGTACCTTGTTTCTTACTCTTTGTTCTCTGCTCTTACTATGAAGAAGCAGAGACTGGA
ATTCTGCTTGAACCCACATCTACCTGGAAATTCCAGTTTTTCTTGTCCAGTGGAGCAGCAATCCAGTTG
TTTTAGGACAAATGGTCTGCCCTTGAAGCTTAAATCCTTTGAGGGCCTGGCATGGTGACAGTTTTACAT
TTGGCTTTGGTATAGACTGGTGTGGTCCCTGGGCAGTGAGGTCACTGTAAGGCCAGCCAGCCAGACCC
TGGCTCCTAGGGGAATTAACAAGGCATGGGATTAGACTCACAGGGTCCCTCCTGTCCCTAAACTTGGT
AGGGGTTCCTGGGAGCCAGACTGCGATTAAGATTGTAGAGACCTGAGACCTGAGTTGTAGGGGCCTCT
GTGTTGATCTGGGCCATTGCCGGGTGAGCTGAGGCGGTCACTAGCTCAAGGAGTGATCTCAGGATATT
GTTCTGTAAGTCAGAGACCTCCAGGTTGGAGAGTGGGGCTTGGGGGTGGGGGACAGGGTTTAGTGGG
GAGCTGGTTCTGGGTGAATGTGGCCTAAAGGGATTTGTCCTTAGAAGACAGAGGGGTGAGTCACACAC
TCAGTGCTTCAGGTTCCACTTTGCGGCTTGGCCTCAGCCCGCCCCTTCCCTGCACAAATGAAGGCCAGG
GGCTATATAATTGGCTGTTGCTGAATTCTTTGGCAGTGATTTTAAAGTCTGGTCTGGGTGTGTTATGTA
GCTGCTTCTCTATCCACTCCCCACACCCGCTGCTTCTCCAGAGCCCCTCACAAAGCCCAGGCAGAGAG
AGAGAGAGAGAGAGAGAGAATGACTTGCCTCACAGAGATGTTGGGGATAGGGATAGGGGTATGGGTC
TTTGCTTTTGCCTTTTGAGGGGGGATAATCTCTTCCTTCATTTTAAAAGTAAAAAGTAATGCAGGCTCA
TTGAAAATAATTTGAAAAGTTGAAAGAGATATAAAAGCACACCCAAATTCCTATCACCCAAAAGAAA
CATACCGGCATATTTCCTACTAGTCTTTTTCATGTTTAAGAATATAGCTGATATATTTTTTTTTCTTTTTC
TTTTTGAGACAGGGTTTTTGCTCTGTCACCCAGGCTGGAGTGCAGTGATCACGGCTCACTGCAGCCTCG
ACCTCTCGGGCTAAGCGATTCTCCCACTTCAGTCTCCCGAGTTGCTGGGACCACAGGTGCACACCGCC
ATGCCTGACTAATTTTTGTATTTTTTGTAGAGATGGGGTTTTGCCATGTTGCCTAGGCTGGTCTCGAACT
CCAGAGCTCAAGTGATTCACCTGCCTTGGCCTCCCAAAGCGCTGGGATTATAGGTGTCAGTCACCACA
CCCAGTGTTATAGCTGTTGTCTTTATAGATGAACAGATAGATTGACATAGATTCATGTAGATAGCCTGG
TGTTCAGCATTTTTCATTTAAGATTCTGTCACAGACTTGACCCTATACCTTTAAAAATCACAAAGGCAG
TATCATAGTCTGTCAGCTGAATATGCCATAACTTAAAAAAATCATTCAACTGTTGCTGAACACACACA
TATACATATATAGTTTTTGTTTTTTCTTAGTGATGTAGTGATGCTTGTGCAGAAAGCTTTATGTACTTTT
TGGATGGTTTCTGTAGGAGAGCTTTCTAAAAAAGGAAAAAAAGTGTTGAATGTTTTTTGAGAAGGGCT
AGATTTTCAAGCCAGTCTTACAAAAGGATAGACTCATTGGAAATTCCAGATTTGCTTAGTGCTGGCAG
ATGAGTATCACTTATTGCTGAACAATGTGTCTAGAATTCTGATTAAAAAAGAAACTAGGTCCAGGAAG
TGCCTGGGGGCAGGGGCAAAGGGCCAGGCTGCAGGATAGGCTCTTAGGATCTGGCTGAGCAGAAATC
TGCTGTGAACAGAATCGGTGGGGGTGATGCTTTCTCAGTAACTTCTCCATTTGTTTCTTTAGCAGCTAA
GTCCCTGTGCTGGACTTCTGTGGACTACTGTGGCTCTGGGGCTGTGGTTGTGGGTGAACAACAGCTAG
CTAAACCAGTGCTGTTGACATCATTGAGATGTGACGCACAGGAAGGTGGGAGCAAGCTTGCAAATCA
GATTCTGAAACATATAGCACAGCTCTCCCACCTCCAGGTGGTCCTGAGATCTAGGGAGGAGCCATAGT
GAGAAACTTTAGGTTTCTAGGAATTCTCTTAGGGAGAAGCTCTCTTAGGGAGAGGCAGAACCTGGTTC
TCAGTTGGGGCTGATTCAGGTGGGTTAGATCAATAAAGCCTCAGGCCAGTGTGCCAGGCTATTCCCAA
GGAGTATACTTTGAAGTTACTCCCTTTAGAATGTCCTCAGTGGAGATAAATTCTCTCTGAGGAGCAGTT
TTGTCTGCCGGGGTCATTTGGCACAAAGCCTGGAGTGCTAGGGCGAGGTTGCACTGAGGGAAGGGGC
AGGATTATGTCAGCAGTGTGACGGATACAGTGTGAGGTCAGGCTCCTTCCTGCCCCACCACGGGGGCC
TAGAGGTCATGGGGAGGGTCCCTGGCAGGGGATTCAATCATTGCTTGGCCCCATGACAGAGTATATTC
TAAAAATGCCTTAAGTTTTTTTCTTTCAAAGTTTCTTCCTGTTTTGCATAATGGCCTTTTGCCTTTGACA
TCCTGAAACCGCAGAGCTGTCATTGGTGTTGCAGGACACTGCCAGCTTGAAAAAAATCAACAACAAA
AAAAGAAACAGGAAAGGATGTGGAGTTCAGGGTGCGGCCTAGGGAAGCTGGTATTTGCGTTATGGGA
TTGTGGGGATGTGGTATTAAGGTGTTGGGTAGCGCCTGACATTTAGAGGAGTACTCTGGGCAGAGTCC
CTGCCTGCCCAAGAATAGGTAGAATTGAGTCTTCACACCAAAGTCAGGAGAGACCCCCTCCCCCCAGG
AAGAGAATGAACAGGGACTCATTTCCTCATTCAGCAAACTTTTATTGGTAACTACACTATATGAAGTG
TGAGAGATAGACATGAACAAGAGAGGCCCCCACTCTTGGGCAGTCCCTTAGTAGTAGTAGATAGACTC
TGGCAATATGGTGTGGTCAGAGAGAGGAAGCCTGGGTGCTTTGAGGGTACTGAGGAGGTGCAGGGAG
CCAAATGGGTGGTCTGGGCCAGGGCCAGAGTCAGAATGAAGGACCTCTCTTCCAGACGTTGATTTTAG
CATCTCTGTCTCTCAGTATGTTTGAACAGTCTCCCTTATTGGAAGGGCAGGAGTCTACTGCTAAAAGTA
ACCTGCGATTTCCTCTACTTGCTGTCATGTGGAAAGAATACTAAAGCTGAAATTCCAAAAGTTGCACA
CCTTTACCAGCAGGGCAGGAGAGGAAAGGAAATGGAGGCAGAGTGAGCTGAAGATGATAAAAGAAA
GAGAAGGTGGTGCAGTTTGGACTGTTATGGACAGAGGAAGTCTGAGGGTAGCTGGACTGAGGGATCA
AAGGGAGGCAGTTGAAAGGGAAGAGAGCTGCAGAGAGGGATTTCTTGGTCTGCAGAGGGTAGGAGC
AAGCCTTGAAGGCTGCTGGAGTGAGGATTCCGAGCCCTGGTCTTTATTCTTTTTCTAATTCATTACATC
ATTTTAGGCAAGTCCTAACTCCTTTGGTCTCTGTTGTCTTTCTGAAATTTGAGTGGGCTGGGCCTGCTG
GTCTTTAGCCTCTGTCTTTCTCTACCTCCTAGATTCCAGTTTGGCGAGTGGGGGGGAAAACCTGGTTGT
ATATGCAACGTGAAAGGCCTCTGGAATTCCTTTTGAAGCTCACTACCCATGAGGCTTCTGCTAAGGATT
TCATCATGTCTGTCTAAGCAGACATAAAAATTTTAGCAGGTGGATGACCCGTAGAAATGGCACAAGGA
ATGTTTCTTTCTGTCACACTGTGGTATTTGATTTAAGAAAGTTGTTATCCTCTCTGTGCCTCAGTGTTCT
CACTTGTAAAATGGCAATAACAGTATCCACCTCATAGATGTTATGAAATACAGGTAGTAGCCACGAAA
GGGCTTAAAACAGTGCCTAACACAGAATAAGTTGTGAATATATGTTATTTATTATTGGTAGTATAATG
CTTATTTGTGAAGATTTTGGCTTTTGCTTTATAGGACCTTTTTTTTTTTTAGTTGAAAATACAATGTTAC
CATGTTAAATGTTAAAAAAAATTCTACTTACCATTGTAACAGAACATGCTCCCACTTCTGTAACAGAG
CTTGCTATTACTTTTCAAATGCATACATATTCCAATGCATATATTCCAATGCAGTTGTAGAGTGAAACT
GTTTGCATGCAGCCATTTTTATCCAACATTATCTTATAAAATGTTATGTTGTTTATGATTATCCTAATTA
TCTTTTGTTGCTGTCTAGTATCCTTATAGATATTCCATTAGCATACACTATTCCAGGTTTCACTATCGTC
GATAATCTAGATATGAACATTTTTGTAGTGTGTAGCTCTTTGCTTCAGTTGAATTACTTTCCTGGGATA
AATTCCTGGGGAAGAATTTCTAGGCCAGAGGATATGGTCATCTTGACAATACTGATTCACATTGCTGC
ATTGCTTTCCAAGAGGTTTGGAATCATTCACAGGTTCTAAATTGGAAAATCCTGGCTTTTGAAGTATGT
GGATTCTAAGGGCGATTTGGATCTAGCTGGAGCCTCACACTGACACTTCCAGCCAGTGTGTGTGTGTG
TGTGTGTGTGTGTGTGTGTGTGTGTAGTTCCCTATGCTGGACACCGTGTGTGTGTGTGTGTGTGTGTGT
GTGTGTGTGTGTGTAGTTCCCTATGCTGGACACCATGTGGCCTTTCTGGACATTAGGGTTTTCCTGTGA
TTGCCTCAGAGCAGTTCCTGTTGAATTCACTCTGTGTCCACAAAAGGAGCCTTACTGTGGCTCTTTCAA
CACCCACCTACCTTTGCCAAGTTGGTTTACAGAAAGTAAGAACATTCTTTCCTTCTTCCTTGATATGTG
GCGCTAAACCTATAGCATGGGGCAGGCTCTGGCTTTAAAAACCTGACTTAAAAATAATGGTGTTGATC
AAAAAGTTTGTGGATCAGTTTTTGGAAACACTGCATGTAGCCATCCATAGAAACTTATATTCTGTTGGG
CTAGCCTGGGCGCCTGATCATTTAACTCATGTGGATGAACTTCTATGTAATAGCCCTGGTGTATGGGAT
CCAGAAACAGGGCCCTAATGAAGAAAGGCTTTTAAATTATGTTGGATAAAAATAAGTTGTTACAATAG
CCCAAAGTCTGCAAATATGAATTGCCAGTTCTGTCCTTGTAGTCATCCACCATGTGCCTGCATCTTTTG
TAGACTCTTGTAGATTCAGAAGCCCACTGAATTGCATAAATGATGGAATGATTTTAGACTTAGTGATTT
CAGTGACTAAAAGTTTACAGATCCTGGCCGGGCACAGTGGCTCACACCCGTATTCCCAGCACTTTGGG
AGGCCGAGGTGGGTGGATCACCTGAGGTCAGGAGTTTGAGACCAGCCTGGCCAACATGGTGAAACCT
TGTCTCTACTAAAAATACAAAAATTAGCCGGGTGTGGTGGCATGCACCTGTTGTCCCAGCTACTTGGG
AGGCTGAGGTGGGAGAATGGCTTGAACCTGGGAGGCGGAGGTTGCAGTGAGCCCACATCAGGCCACT
GCACTCCAGCCTGGGTGACAGAGTGAGACTCTGTCTCCACCTCCCCCGCCCCCCGAAAAAAAAAAAAG
TTTACAGATCCAGCAGATGGGGCATATTCAATTTGTGACAGCCACTCCCTTCACCTTATAGCTATGTCA
TATGTCTTCTTCTCCTTTGACTGCATTCTGCAGCAGTCAGTTGTGACTTAATATGGCACTCTGGGCCCAC
TGAATTAGGTCAGAGCTGCTAGTAGTATATTGTTCCTAGAGACCTAGGGCAAGATTTTCTTACTACATA
AAATGAGGGAGATAATTTCTTACCTCAAGATGTTGGTAAGAGGAGTGAATGAGGTTAGTTATATGGTA
ATATCAGTACTCTGAATGTCTTTTGATCAATGCCTAACTCATCTTCTTGGGCACAAAAGGCATACAGTC
AGCACCCTTAGGCCACATATAAAATTCCTCCAAATGCAGGTTTTCATCTGCCTTGGGGCAGAGTCAAG
AGAAAGAAGAGGAAGAGGCGTGAGGCTCTGACCACAACTTAGGGACAGAATATAGCCCAAAGCGAG
TACCCCAGGCCACAAGGAGAAGGCCGCTATCTTGTTGAATCCACAGCACTGGAAACTTGGAGTGTGTG
TTCCCCTGTGTCAGTTACACTGGAATTTTATGGCTGCTCACATTCTTCCCTTCAGGTGGACGTTGTTCAT
CAGTATCCTGGGCAAGAGGCCATCATAAACCACAGACAGCTGAGTGATTAGGAAGAGGAGCTGAAGA
GGGAGCATTAGATGTTTGATTGAGTCTTAGGTGAGAAAGTATATCATTAAAACAAAAAGATAGATGTA
GGCGGGCTCAGTCTTGTGTGCCTGGTGTGTTGGTAGAAAAACTAAAGCACAAGCCTGTAGATAACCTG
CTTTATTCTACCTCGGGGCTGGTGTTGGAATCCAGGATGCCAGACCCTAAAGTCCAGCTCTCTTTCCAA
CCTACTGAATAATCCGAGAGAAATCATGTTCTCTCTCTGGGCCTCAGTTTGCCCATGTATAAAATGAGA
TGAAGGATTGGCTGGGATGCTCTCCAGAGTCTCTTCCTGCCTGGAGTTCTGACGTAGCCATGTACTCCT
GCTCAGCATCGCTAAATGGCTTTGTGGTAGGACCATTGAGTGCTGCCTCCATTAGGGCCAGCTATGTA
ATGCTGGGGTGGCTGTCACTGGGCCCTAAGAGCCAGGATTGGTCTTACTGGAGAAATCCACATCCACC
TAAACTTAAGACCCAGGGGTGTCCAATCTTTTGGCTTCCCCAGGCCACACTGGAAGAAGAATTGTCTT
GGACCGCATATAAAATACACTAATTATAGCCGATGAGGTTAAAAAAAAAAAACTCAATATTTTAAGA
GAGTTCATGAATTTGTGTTGAGCTGCATTCAAAGCCATCCTGGCCGCATGTGGCCCATGGGCCATCGG
TTGGACATGCTTGCTTTAGACCTCCCAGCAATTCTAGTCTCTAAACAGGAAATCAAAAGTCAAGATGA
ATAGATAAGTTGGTCAGTGTGAAAAAGTAATTGGTGGGAGCCACTGTAGATGCAGGGTTCTAGGCTCC
ATCAACAACCACCTACATCACTGAACGAAAGATAATGCTTGTTCAGCACTTATTACATGCCAACCATG
GTAAAAATACTTCAGATGCATTGTTTTCATGAACTCTCACAGCAGCTCTTTTTCTTGCCTAAATGCCCC
GTTAGAACCTCCAGTACAATGTTAAATAGATATGCTAAGAGACAACATATGTGTCTTGTTAGGGGGAA
AATATCCAGTCTTTGACTATTAAGAATGGTGTTAGCAGTGGGTTTTTCCTAGGTGCCCTTTATCAGGTT
GAGGAAGTTCCTTTCTATTCCTGGTTTGTTGAGTATTTTTATCATGAAAAGGTGATGGGTTTTGTCAAA
TGCTTTTCTGTGTCTGTTGAGATGATCATGTTTTTTTGTCATTTATTCTATTGATATGGTATATTATACAT
TGATTTTTCAGATATTAATCTTGCATACCTGGGATAAATCCCACTTGGTCATGGTGTATAATTCTTTTTA
TTTGTTGCTGGATTGAGTTTGCTAGTATTTTGTTGATTTGTATTCATAACAGATAGTGGTCTGTAGTCTT
TCCCTCCCTCCCTCCCTCCCTCCCTCCCTCCCTTCCTTCCTTCCTCTCTCTCTCTCTCTCTCCCCTCCCCTC
CCTTCTTTTCCCCTCCTCTCCCCTCCCCTTCCCTTTCTTCTCTTTCATAGTTGTTTACCACTGTCAGAAAA
GGTCTGTTCGTTTTCTTTCGTCGTGAGATCTTTGTTTGGTTTTGGTATCAGGGTAATACTGCCTCAAAAA
ATGAGTAGGGAAGTGTTCCTTCCTCTTCTGTATTTTGAGAGAGTTTGTGGTCGGTTTTTATTAATTCTTC
TTTAAATATCTGGTAGCGTTCACCAGTAAAGCCATCTGGGCCTGATGTTTTCTTTGTGGAAAACTTTTT
GATTCCTAATTCAGTTTCTGGTTATAGGTCTATTCAGACCTTCTATTTTTTCTTAAGTCAGTTTTGATAG
TTTGTGTCTTCCAAGGAGTTTGCTTCATCTAAGTCATCTAATTTGTTGGCATACATTTCATAGTGATTCC
TTATGATCCTTTTTATTTCCGTTAAAGTTGGTGTAGGGATAGTCCCTCTTTCATTACTGATTATAATAAT
TTGAATTTTCTTTTTTTCTTAGTCTTGCCAAAAGCTTGTCATTTTTATTGATCTTTTCAGAGGACCAACTT
TGAGTTCATTATTTGTTCTCTTTGTTCTTATTTTTCTGCTTCATTAACTTCTCTAATCTTTATTCTTTCATT
CTGCTTGCTTTTGGTTAAGTTTGCTTTTTCTGGTGTCTTAAGGTAGAAGGTTAGGTTACTGATTTGAGAT
TTAAAGATCATGCTCTTTAAACGTTTTGATAGATACTGTCAGTTTGCCCTCTGGCTTTTTCTCATTAACA
GTGTATAGGAGTGCTTATTCCTCACACTCATACCAGCCCTGGGTGTTACTAACCTTTATATATTTGCCA
GTATCATATTCAGACATAGTATCTTGTTTTAATATGTTTCTCTGATTACTGATGAAGTTAAGCAAATTTT
CACGTGTTTATTGGCCATCTGTCTTTCTTTTTTCATCCTTTCTTTCAAGATGGGAGTCTTTGCCATGTTGC
CCAGGCTGGACTCGAACTCCTGGGCTCAAATGATCTTCCTGCCTCAGCCTCCTGAGTAGCTGGGACTAT
AGGCGTGAGCCACCATGGCTGGCTTGCCCATTTGTATTTCTTATGTGAGTATTTTTTCTTTTTTTTTGAA
GTGGAGTCTCACTCCATCCCCCAGAGTGGAGTGCAGTTGTCCGATCTTGGCTCACTGCAACCACCGCCT
CCCAGGTTCAAGTGATTCTCACACCTTAGCCTCCCAAGTATCTGGGACTATAGGTGTGTGCCACCACAC
CTGGCTAATATTTGTATTTTTAGCAGAGATGGGGTTTCACCATGTTGGCCAGGCTGGTTTCAAACTGGC
CTCAAGTGATTCACCTGCCTCGGCCTCCCAAAGTGCTGGGATTACAGGTGTGAGCCACTGTGCCCAGC
TGACTTTTTTTTTCTTTTTTTTAACCCTTTTTTTTTTTTACCCTTTTTTTGGCCCATTTTTTTTTACCCTTTT
TCTTTTAACCCATTTTTCTATTAGTTTTAAAAATATGTTTGCAGGAGCTTTTTATATTGTGGATTTTTCTT
GTTTATTACATATCATTTGTAAATATGGTCTCTCCATCTGTCACTCTTCTTTATCTCTGGTTTCTTTAGCT
ATGTAGAAGTTGTTATGTTATGTTATGTTATGTTATGTTATGTTATGTTATGTTATGTTATGTTATGTTA
TTTTTTGGAGAGGGAGTCTTGCTCTGTCGCCCAGGCTGGAGTGCAGTGGTGAAATCTCGGCTCACTGC
AACCTCTGCCTCCTGGGTTCAAGCGATTCTCCTGCCTCAGCTTCCCGAGAAGCTGTGATTACAGGCACC
CGCCACCACACCCAGCTAATTTTTGTGTTTTAGTAGAGACGGGGTTTCACTATGTAGGTCAAGCTGATC
TCAAACTCCTGATCTCAAATGATCCTCCCAAAGTGCTGGGGTTACAGGCGTGAGCCACTGCACTCGGC
CAGAAGTTTTGAATTTTTATGTGTTTAAATCTATGTTTTCCTTTATGACTTCAGGTTGCTTTCATACTTA
AGCAGGTCTTCACCATCCCAAAATGATAAAATTTTTCTCCTGAGTTTTCTTCTAAGTTGGTTCTTTAGA
AGCCACCAACTTGGCTTCGACAGCAAAAGATGAACAGAATTTCTGTTCAACTCTCATGCTGCAAGAAG
CTTTATGTAATACTCCAGGGACCCTTTAAGGTCCCAGAGTTTTCCTCCAAATCTATCAGTGATTCTAGT
GGCTAAGAGTAGAAATGTGAAAATTTAGCCATGTGTGCTGATAGAGCTGTAGTAATTTGTAAGCTCTG
AAGTTCTAAGGAGTCAGGGGAGAAGGGAAAGTAACATTTATTGAACATCTATTAGCTCAATAAGAAC
ATGCGATAAGTATGTATATGTATTATTTCACTTACATCTGAAAGGAAGGCATAATTATCCCCACTCCTT
AGAGAAGGAAATTGGAGCTGGCTACATTTAAAGTAGTCCTGACACCAGAGAGATATTGCCAGGAGTA
CTTGGCTGGCTGAGTGCCCAGATGGCCCATAGGAGTAGTGGGCCCTCCACAGTCCAAGGTCTGGTTCT
AGGTGGAGAGAGAAGGATGTGCTCGTAGTCAGCACCGCAGCTCCAGAAAATCTGCTGGGGCTCCAAA
ACTGATTAGAGGGGCAGCTGACTCAGTAATAAAACTCCCAGGAGACTTACTTACATACTGGAATGCAA
AGTTGCAGCTTTACTGGGAAGATTAGAACTGTTATTGAGTAGCTTAGAAATCTCTGGCTGAATTCACTG
CAAGGGAAGCCGCAGGATAAGCTAACTGCTGGTGAGTCAGCAGTCAGAGCAGGGAAGTGAATTTAAC
ATTAGATGGGTCAGTCTCTCGTGGCTGATGAATTCATCCCCACAATACTGTACACCTGCCTTAGGGACC
TTTGTCTGGACTAGGGGTTGGGGTCCCCCTCCTTTGTACAGCCCTGGAAGGACACATCCAGCTCCATCC
GCCATCTCTCCCTTACTTATTTCCTTCCTTCCTTCCTTCTTTCCATCCAGCCATCAAGCTTCCTTTCATGG
CCAATAATCATCATTGGGGTCTACTCATGGACTCTCTTGCCTCATGTATTTGTTTTATTTTGTCCTCATT
CCCACTTCTATTTCCCAGGTATATCACAGGCAACTATTCTAACGTATTTATAGTTTGTGTATCTGTTTTT
GCTCTTGCCAAAATGGAAGCCACTGCTTTATACATAGATGTATTCTTAACTTTAAAAAAAATTTTTTTA
GATTAACCTACAATAAAATTGGCTTTTTGGCATATAGTCTATAAATTTTAACACATACATATTTTTGTG
TATCTACCACCACAATCAGGATACAGAACAGTTCCATCACCCCAAAAAAATCCCTCTTGTAGTCACAT
TCTCCTCCCACCCTTAATCCCAGGCAACCACTGATCTATTCTTCATTACTATTGTTTTGTCTTTTTGAGG
ATGTCACATAAATGGAGTCACACAGTATATATACATTTTTTTAAACATATGTAAATGGCATTTTATAGC
TCATTTTGATTATATGTTTTTCATCCAGTTCTGTTTTTTTTTTTTATTTTTAAAAAGTTTGACATAACTTC
AGACTTACAGAAAAGTTGTTAGACTAATACAAAGAATTCCTGGATATCCTTTGGAGTCCCTAAATGTT
AACATTTTACTATATTTACTTTTTCCTTCTCTCTCTCTCTCTCTCTCGCTCTGTGTGTGTGTGTGTGTGTG
TGTGTGTGTGTGTATCTACCTGTAGATAGATAGATATTAATATAATTTTAGATAGATGTATCTAGATCT
CTCTCTCTCATATATATGTGTGTGTGTATATATCTATATCTATATCTATATATATCTCCTTTTACCCTTAA
ATATTCAGTGTATATTTCCTAACAACAAGGTGATTTAAAAATATATATATAAACATAGTATAATTAAC
AATCAGGACATCAACATTGAAACATTTCTGCTATGTCATCTACAGGCCTTAGGAAGACTTTGTCAGGT
GCCCCAATAATAGCCTTGATGGTAGAAGAAAACCATGTGTTGTATTCAGTTGTCATGTCTCTTAGTGTC
TTGTAATCTGAAATAATTCCCAAGCCCTTTGGATTTCATGACAGTGACATTGTTGAAGAGTACAGGCC
AGTTATTTTGTAGAAGGTCTCTCAGTTTAGGTCTGTCTGATGTTTCCTCCTGATCAGATTCAGGTTATTC
ACTTTTGACAGGAATACCACTGAAATGATGCTGAGTTCTTCTCAGTGTAACGAGATCTAGAGACACAC
ACTGTCAGTTTGTTCCTTATTGGCAGTGTGAACCTTGAGGATTTCATTGTAGTGGCATTTGGCATTACT
CCATTATAGTTACTATTTTACCATTTTAAATTAAAACTATCTGGCCGGGCGTAGTAGCTCATGTCTGTA
ATCCCAGCACTTTAGGAGGCTGAGGCGGGCAAATTGCTTGAGGTCAGAAGTTTGAAACCATCCTAGCC
AACATAACATGGTGAAACGCCATCTCTATAAAAAATACAAAAAATTAGCCTGGCGTGGTGGCGCATTT
GTAGTTCCAGCTACTCAGGAGGCTGAGGCACAAGGCTTGCTTGAGCCTGGGAGGCGGAGGTTGCAGT
GAGCTGAAATCACGCCACTGCACTCTAGCCAGGGTGACAGAGTGAGACTCTGTCTCAAAAAAAAAAA
GTAAATAAATAAAAAAATTTTTTAAGTATCTTATGGGCATATACTTGTCCTGTTACTCCTCAAACTTTC
ATCCACTTTTTTTTTTTTAAATTTTTTTTCTTACCTTTCATCGTTTTCTTGATATCCACTGGGTTTTAGCAT
CTACAAATGATTCTTGCCTGAATCAGTTATTATGGTAGTTGATGGTTTTCTAATTCCATTATTCCTTCTA
TGTTTGTTAATTTTGGCATTCTTCTATAAGGAAGAGCTTACCCTTTTTCCCTATTAATTAATTCATATAT
TAATGCAGACCTATGCATTCTTACTTCATTAAATCATAATCCTTTACTATCATTATGTATTCTGATGTTC
AGACTATCCCAGATTTAGCCAATAAGATCCCCTTCAGGGGAATGGTCTTTGGGATTCCTCTTTAGAGGT
TCCTGGTTCCTGTTTTCTTTTGACATATCCTATTACTCTTTGAGCATTTTTTTTTTTTTTTTTACTTTTAGG
CACAGCAAGAAGTTCCATGGTCCTCTTGTTCTTTCCCCAACTCAGCCCTAGAGTCAGTCACTTCTCCAA
TGAGCTCTAGTTCCTTTTAGTAGAGAATCATAATTAGAAAACAAGAATCAGTGCCAAGTGTGCACCTT
TGTTTTTAAGGTCCATCCACGTTGCCGTGTATATGTCCAGCATGTTGATTCTAACTGCTGAATAATACC
TCATGATTGTCATCCATCCCAGTGTTTCTTTTTCCCTTCTGTAATGAGGGACTCCTGGACTGCCTCCAGC
ATTACCTTCACAAATATTGCTGTGAGGAAAATCCTTAAACGTTTCCTTTATGGGCAACGTGTGAGCATG
TTTATGTTGATTCAGGGGTGCCAGACACAGCTCCAGAATGGCTGCCTCAGTTTACATTTCCACCAGCAG
AGCATGACAGGCTCTGTGTCTCCGTGAATAATCAGCATTAACCAGCTTCCTATTTTTTGCCAAACTAAT
AGATGTGCTAGGATAACTCTTTGTTTTAACTTGTTTTTCTCTGATTACCAATGAGCTGGAGCATTTCTTC
ATATGCCTGATGGTCTTTGGGATTCCTCTTAGGTAAATTGCTTATTCATTATAATCCTTTGCCTGTTTTT
CACTGGAGTTCTTATATTTTTCTTGAAGATATGCAGGAATTCCTTATACATCCTAGATATTAATCCCTTC
CTGGTCTCAGACATTGCAGATATCTTCTGAATCTGTTATTTACTTATTTATTTACAATTTTTTTTTTAAG
AGTTGGGGTTTTGCTCTGTCACCCAGACTGGAGTGCAGTGGTATGATCATGACTCATTGTGGCCTCGCA
ATCCTGGGCTTAAGCGATCCTCCCACCTCAGCCTCCTGAGTAGTTGGGACTACAGGTATGCACCACCA
GACTTGGCTAATTTTATTTTATTTTTTAGAGATGGAAGTCTTAATATGTTGCTCAGGCCAATCTTGAACT
CCTGGCCTCAAGCAATCTTTCCACCTCAGCCTCCTGCATCTATTATATATATGTTCACTTTGCTCATGCT
GTATTTTGTTGCAACATAAAACTATTTTTCCCATTGTTTTGTGCAGTCTCTCACCAGCACTCTTCTTTTT
CTGTAACTGTGTTAATGCCCTTTGTTCTTCCATATGTTAGGTATGCTGGTATAGTTGAACTCTGCTGACT
CTCCTCAGTAAACAGTCTCTTTTTATGACACCTTATCCTCTACTGAATTCTCTCTATCAAGAATGACTTG
GCCGGGCATGGGGGCTCATGCCTGTAATCCCAGCATTCTGGGAGGCCGAGGTGGGCAGATCACCCGA
GGTCAGAAGTTCAAGACCAGCCCGGCCAACACGGTGAAACCCTGTCTCTATGAAAATACAAAAATCA
GCTGGGCGTGGTGGCAGGTGCCTGTAATCCCAGCTACTTGGGAGGCTGAGGCGGGAGAATCACTTGA
ACCTGAGGGGGAGGTTGCAGTAAGCCGGGATGGCACATTGCACTCCAGACTGGGTGATGGAGAAACT
CCATCTCAGGGGGAAAAAAAAAAAAAAAAAAAGAATGACTTGTCTTCCTCTTAGAGTGTGAGGTCTA
CATACAAATATTATTCTTGTATTCAGCAAATGTATGTCATAGGCCTAGTGTGTGTTAGGAACTGTGCTG
TCACCAACAAAGTTTAGAGAGGTTATAAAACTTGACTGTAGCTTTTTAGAGGTGGAGGAGTGATTTGA
AACCTAGGCTGTAATTCCTTCCTCCTGTGATTCCTTCCTACTGTGTTGCCTTCCCTTGAAAATTGCATTT
GGGGGCCAGGTGTGGTGGCTCTCGCCTGTAATCCCAGCACTTTGGGAGGCTGAGGCGGGTGGATCACC
TGAGGTCAGGAGTTCAAGACCAGCCTGGCCAACATGGCGAAACCCCGTCTTTACTAAAAATACAAAA
ATTAGCTGGATGTGGTGTGTGGTGACATGCACCTATATTCCCAGGTACTCAGTAGGCTGAGGCAAGAG
AATCACTTGAACCCAGGAGGCAGAGGCTGCAGTGAGCTGAAATTGCACCACTGCACTCCAGCCTGAGT
GACAGAGTGAGACTCTGTCTCAAAAAAAAAAAAAAGAAAAGAAAGAAAATTGCATTTAGTTCCTGTA
GACTGTGTGTCAAATGTCTAAATCTCTTCTAACAAATGGCCTAAGGAGGTGCAAAGCGAAGCATCCTC
ACCAGCATCCTGACTTGGCAGTGAGGCATGGGACCCTGGAGGGAGTAGTGGTAAGTGTGACTCTGGA
ATTCTTCCTGGGCTACTTGTCAGTGACTGGCTCCAGATTGAGAGGAGAGCCCAGAGGACACAGGTGGC
TGCCCCAGCCTGGAGGTGAAAGTCTTAAAATAAAATGCCAGATGCCTAGACCATTCTAAACCTTTCTG
AGAAGCTGAAATCATCCCTTCTGGAAGCGCTCTAGTTCTAAAAGGACAGATATACAGCAAGATCTTCC
TGGGGCTAATATGGAGTTTATAGGCAAGTAGGCCTCAGAACCTTTCCCTGGTAGTGATATCTGTGGGC
AGGCACAGTTTCCACACTTTCCAGAAATTCCAGCGGAAGGAGTGAGAAGGAGGAATCTGCCCTTGAGT
GAGGACCAAAGAAAGCAGAAATTCCTCTTGGGAATTTTTCCTCCAGAGACCAAACACTACTTGGGAGC
TTGTTTACTGGGCTTTAAAAGCTTGTGACCCCCAGTCACTCTTTCTTGACCCCAAGGCTTTGCATTTCTG
TGGCTTCCCCACTGGACAGAAGTGGAACTGTCATGCTGCCTGTTCTGGGGTCTCCCAGAGGTTTCCCCA
TGTCCTCTCCTTGCTTCTACTGCCCCACAGAATTGGGGATCTGTGACCACATATGGTATAGAATTAATG
CTTGAGAATGGTTTAGTTCAGTGATGTCAAATAAGATTCACTTTTATGCCACCTCCATCAGTTGAAGGC
CCCCCTGGCCCCTAAATTGGAAAAGATTCTGAGACAGAATCCCCGTGGGTACAGCGCAGGGACAGTA
AAGGCACGTGTGCTGTGATTTGCTATCCACTGTGTGGATGCATCCAGGAATATCAGAACCCTGGAAGA
TTATTTAAGGGGAAGTTAGGACAGCTTTTTTGCCAATCCAAGGGTGTTCTTGAGGAAGTCTGTCTTCCT
GTATGGCCTTCAGTTTCTTTCCTGTGTAACCATGGGGCCAACACATAATTCCCACAGCTCTATTGGCCC
TTGTCTGCCAGGATTCTCTAGGGTCTGATTCGAGGTGGATCCTGGCCCTTTGAGGTGGCAGAATCTGAT
CATGGTGCTGTTTCCTTAGATTTAGGCCTTGATACCCTTGGCGAGAGCATCCTGGGCTGAGTGACCACC
TGAGGTTTTTCTGGTGATTTTGTGACCCATGTAAAACTTTGAGCTTTGGGATTATTCTCTCAAGGAAAT
AGTGACATTTGGTGAAGAGCCTGTTTGGTGTGGCTATGTGAGGCTTAGCCAAGAAAATGCACCATTTT
TATTAGGAGGTTAGGCCATCCGTTGCCACAAAGTGTCAGATGCTAGGCCTAGAGCCTGGAGAAAACTT
ATTTTAAAATTGATGGGGTGCTGGAGGGGTTGGGGGGTGGTGGCTGTAGCTCATGAATCAGGTGCTAA
ACCTAGAAACAAAAGGCCTCATGTGGCAGACTGTTTCTGAGCACAGATGAATGGATGAGCAACTGGC
GCAACTTTGCCCAGTTGGTCCAGCTTCCCACTTGGCCACCTAGGCTTGCTGTGAAGACCTCGTCTGGCA
GAAATGAGAGTGTTTTTGCCCCATCTTGATCTTAACTGTAATTTAAGACTAAAATCTTAGATTCTAAAA
CATCAAAGGCAAGATGGCTCCCAGCTCTGTGAGCTCAGCTTCTCACCTCTTAGTTGAACAAGTGCAGT
GTGGGTCAATACATGATTGCTGCTCTTGCTGCCAGGAACTGTCCCAGCATAGAAAGGAATGGGACACA
ATCCCTGCCGTCAAGATTCTAAGGGAGGAAGCAGGCAGGTCGACTGGTGCCTCATCTCTGCAGGGCTC
CAGCCAAGGTTTGTGAAGGATTTTGCAGGCATATGGAGTGGGGACTGATTGATCCCGAGAGGGGACT
GGGGAAAGCTCTGAAGAGGGGATGACATTTGGTTTGAACTCCAAAAAATGGTTGCTTTACCTGTTTCC
TGAAGTTTTTGAGGTGGCTTATAAGAACATATACCATAAAAAGGACCAATATAAATTTAAAATCAGAA
AAAGAGAAAATGGGCTGGGCATGGTGGCTCATGCCTGTAATCCCAGCACTTTGGGAGGCCAAGGTGG
GTGGATCGTGAGGTCAGGAGATCGAGACCATCCTGCCTGGCCAACATGGTGAAACCCCGGCTCTACTA
AAAATACAAAAAATTAGCTGGGTGTGGTGGCACATGCCTGTAGTCCCACCTACTTGGGAGGCTGAGGC
AGGAGAATCGCTTGAAACCTGGGAGGCGGAGGTTGCAGTGAGCTGAGATCGCACCACTGCACTCCAG
CCTGGGCGACAGAGTGAGACTCCTCCTCAAAAATAAATAAATAAAGAGAAAATGGAACTTAGAAAAT
TAAGAGGAAGAGTGAAAAGGTAGATATTTAGTCAGGCACAGTGGCTCATGCCTGTAATCCCAACACTT
TGGGAGGCCAAGACAGGAAAATCTCTTGAGACCAGGAGCTTGAGACTTGCCTGGCAACATCTCAGGT
GAGACCTTATCTCTACAAAAAATTTAAAAATTAGCTGAGCTGTGTGGCTCGTGACTGTGATCCCAGCT
ACTCAGGAGGCCGAGACCACAGCCCAGGAGGATCGCTTGGGCCCAGCAGTTTGAGGCTGCAGTGAGC
TGGCACCACTGCAATTCAGCCTGGGCTACAGAGCAAGACCCAGTTTAAAAAAAAAAAAAAAGATATT
CAAACCATGGGTCCCAACGTAGTTATTATATTTGACCATTTGCAAAAGCTGAAAGCAAAACATGTTAC
ACATTTTCAGAGAGGAAAATACACAGTAGTTCCTGAGTGTAAGTTGTTTTTCTTGACCTCATTCTTAAA
TTGCTTCATGAGGGTGGGAGGGAAGTGGTAGTTAATAAGTGAACCTGTAAACCAGCGTTTCTCAAAAT
GTAGTCCAGGGAATTGCATCAAAATTGCAGTTACCTACAGTGCTTGTTAAAATGCAGATTCCTGGGCC
CCTGCCCCAGGCTTATCAAATCAATCTGGTGAGTAGGACTCAAGAACCTGTAAATTCACATACTTCTG
CAGATGATTCTTCTTGCACTGCACAGCATGAAAGCCTCTGCAATAGACAGAAAGCTACCAGCATTGCG
AAAGCAACTTGAGTGCTTGGCCTTTGAAGGTTGAGTGGGACTTTAATGAGGGAGAGAGTAAGGCATG
AGAAATGGCAGTTCCACTGAGGTCAGTCAGTGGTTCATTGCTGACGAAGTCACTTTTAAGTCATGTTTT
AGAAGAACTACCAAGTGTGGCAGGTCAGGCATGTGGCAGGACTGTTTCTGAGCACAGATGAATGGAT
GAGCACCTGGCCCCACTGTGCCCAGTTGGTCTAGCTTCCCACTTGGCCACCTACGGTCTGCTGTGTGGA
CCTTGTCTGGCAGTCTCCTTTAATTTATTTTTTATTATTTTTTTCTTTTTGAGATGGAGTCTTGCTTTGTT
GCCCAGGCTAGAGTGCAGTGGCATGATCTCGGCTCACTGCAGCCTCCACTTCCCAGGTTCCAGCGATT
CTCCTGCCTCAGCCTCCCAGGTAGCTGGGATCACAGGCAAGTGCCACCACGCCCAGCTAATTTTTGTAT
TTTTAATAGAGACATGGTTTTACCATGTTGGCCAGGCTGGTCTCGAACTCCTGACCTCAGGTGATCCAC
CCATCTCAGCCTCCCAAAATGCTGGAATTACAGGTGTGAGCCACCGCACCTGGCCTATTTTTTTTCAGC
AAATTCTTTGTTTTTCTCTCTGTTCCCAAATGCAGGGTACTGAGACCACAGATGTATTCTGTTTCCTGTT
GAAAAAATGTTTCTCACTTAGCTGGGTGTGGTAGCATGCACTGCAGTCCCACGGGAGGCTGAGGCGAG
AGGATTGCTTGAGCCCAGGAGTTCGATAATCATGCCATTGCACTCTGGTCTGGGTAACAGAGCGAGAA
ACTGTCTCTTAAAAAAAAGAAAAAGAAAAAGAGGTCCTAGGGAAAGAAACAAATAGTGGCTTGGATG
GTGAGTTGGTGGAAAGAACAGTGGGTGTTGGGGGTGTTGAACTTGTGTTTGTGTGTGGTGTACCCAAG
ACATATCATGTCAGCATTAAGAATAGACTATTCCTGTTTTCTGGTCACTGAGTTGTATGTTTTGACATC
CTTATTTTGGAAGATACTTCCTTACTAGGAATGGGATAGGGAGGGGGTCACCTTTCCCATCTGTGGGTC
ATATTTTAAAATATTTATTGTTCAAGTTTAAAGATATAACCAAAGGTATAAAGAAAAATACCACAAAC
ATCTGATTTAAGAAACAAACCAGCCGAGCGCGGTGGCTCGTGCCTGTAATCCCAGCACTGTGGGAGGC
CGAGGCAGGCAGATCATGAGGTCAAGAGATCGAGACCATCCTGGCCAACATGGTGAAACCCCGTCTC
TACTGAAAATACAAAAATTAACTGGTCATGGTGGTGTGTGCCTGTAGTCCCAGCTACTCGGGAGGCTG
TGGCAGGAGAATCGCTTGAACCCAGGAGGCGGAGGTTGTAGTGAGCCAAGATTGTGCCACTGCATTCT
AGCCTGGCGACAGAGTGAGACTCCGTCTCAAAAAGAAAAAAAAAAGAAAGAAATCATTTCCTACACC
TTCGAAGCCTTCATGAGTTAGATTTTGAAACAGTGCAAAATGCTTCACGTGAGAATCGAGAGTCCCTT
CTGGTGGCTCTCCATCCCCTGCTCTTCTGTCAGGTTTTCTTGTAGGTTTATGGAAACCTTTGTTACTTGT
GCAGGTGGCAGAGAAGCAGAGAGGATAGCTGCGCGCCACCCACACAGCTAGGATTTATTGGCGTACT
CCCACGTGCATGGCAGCCAAGTGGACACAACTCTGTGATGAATCCTCCCAAGAGAACTGAGGGGCCCT
GATGGAGGAGCTGCTTCTTTGCAAAGCTTTCCTTGACTCTCTTCCTGTCCCCTAGTTGATTCCCCTTCTG
TGCTAGTTTTAGCTTATTGTTTGTTACCTGTCACACTTAGCAGTACTGTTGGCTTTGCTGGTCTCCTTGA
CTACTGGGGGTAAAGACCTTTTGTTGTTGTTGTTGAGACAGAGTCTTGCTCTGTCGCCCAGGCTGGAGT
GCAATGGCGTGATTTCGGCTCACTGCAACCTTCACCTCCCAGGTTCAAGAGATTCTCCTGCCTCAGCCT
CCTAAGTAGCTGGGATTACAGCTACACCACACCCGGTTAATTTTTGTATTTTTAATAGAGATGGGGTTT
AGTAGAGATGGGGTTTCACCATGTTGGCCAGGCTGGTCTCAAGCCCCTGACCTCAAGGTGACCTGCCT
GTCTCAGCCTCCCAAAGTGCTGGGATTACAGACATGAGCCACCATGCCCAGCCTCAAAGACCTCTTCT
TTACTTGCTCACCCTGCCGCCCACTCCCCTACCAACCCCTGCATGCCCTATACCACCTGGCACATGATA
CATACTAACTGGGTACATGTTTGAATATGAATGGATGTGGTGCTGTGAATGCTTAGGGGAAGTGGGTG
AAATGCTTAAGAACCAACCTTGAGTGGTCTGGGAAGGCTTCCTGGGAGGGTGGTGTTTGAGCTAAGGC
CAGGCAGCTGTTAGATTTGTTAGACTGAAGCCCTTGCAGACTTAGAGAGCTTGTGCTCTTCCCAGAAT
GACGGGTGAGCCACGTACAGTAAATGGTGCTTCTCATTTCTAGCCCAAGGGGCCTCAAGGGGCACCGT
GATTTCACGAGAATGCTGCAAGCAAATCTTTTCTCAAGCTGGGGAATTTGGTGGTAATGCCTGGCTCA
GCTTGCGGTGCGCACCTGGCCTTTGGAAGATTGGTACAGAGAGAAGCGGCCCATCCACATGAGCCTGT
GGAACAGCACTGGTGGGGGAGCTGATTTGTGAAGAGGGGCTGTGCAGTGTACTGTCAGGTCTGAGAC
CCAGGAAGAAATTCCAGTATCCCAGCTCTCAGAATCACAGAGTTCTAGGCACTGCCTAGTTCCACGTG
TTCCCAAATGTTTCCTGAATACTTGGATTTCCTGTCCAGAGAATTTTCAAAACAAACTTAGAGGCCTGA
CCCATGGCTGCCAAGGAAGGATTTTTTTTTTAAATTAAATTTTAAAAATCAGTCCAGCATGAAAATCTA
TGATGATTTCATAAGAGAAAGGACATTTTAATATTCAAAGAGTAAGAAGCACTTAATCTTGGAAGAAA
GGGCATTCCTATACTTTGATTACCTTTAGTTTAATTAAAAAACACCTACATGGTCTTTACTTCTGTGATT
TCATTCCTGGGCTAGTGAAACATTGTCACAATAAAGCATCAGGCCAACGCTTCTTTCGACCCACTGGC
CAATCAGTTGACAAACAGTGACTAGATGTTTCAGCCTATTTTGCTGAGGCTAAAGGATTGAACTAGTG
CTTCAGCCAGCATGAAAACCAGTCAGGAGTCCGTGCTGGTGTTGGCTTAGATTAGCAGGGCCTTTGAT
GGAGGGGCATGTATGTGTTTGGGTTTGCTGTGCCAGGCAGGGGAGCAGTGGAATTTGTCTGAATTGAG
CTCACACATTGAAGTTATTGAGCGACTTACATGCAAGGCCATGACCTGGACTCCCAGCCGAGAGGCCC
ACGTGGCGGGGCTTGAGCTGGGGGAGCCGAGGACAGCTTACATCTGCTCATCTGCTTACGTAACCCTG
CCTCCCAGCTTCCAGAGCCAAGAAAACACACAAGCCAGCCCAGCGGGGCCGAGAGCCTGTGGTAGCA
CACGCCATGCGCCGCACAGCAAGGGCGCCTTGGCTCGGCTTGAGGCCTGTCATGAAGCCCTCAGCCCT
CTGCCTCCTCCCAGAGCTTCTCCCCACCACCCCAGGCAGTGGCTCTGAAACCTGGTCGCAGGTCTGCAT
GATTCTGAACAGAGGTAGTCGTTGCCTTCCTGGAGTCTGAGCTCTCTGGAGTTTCTCACTGGGACAGA
GCCAGGTGTGTAGCAGAGCATGGTCCCTGCAGTATGGCAGGAGGTGTGCAGGGCATTCAGGAGGCCT
CCTGGCTGGCACTCGACCCAATTAGTCATTCAACGCCAGGTCTGGGGCTGCTGTCTGTTGTCTCAAAGG
TGTGAGCTGCAAGATCCTTAGAGTTGTGGAGAAAAAATTGCCAGATTGGCAAGAAGGGCAGGATTGG
GGGTCAAGGTGTCTCAGTGTGTTGGAAGCATGATGGGGGTTGTGCAAGGGGCACAGCGAGTTCAGAA
GGGAGCAGGAGAGTGAGAAGAGGCTGTTCAGTGATAAAGCTCTGCACAGAGCCATTGGAGGAGCAAG
CTCCTTGACCATCCTTAAACCAGGGTAATTTTCATTTAGGTTCTGCCACACGCTCAGCAGGGAACTCCT
GGAAGGCAGGATTTGTCTTGTCCATCCTCCCTCCCTACCTCAACCCACTCCTCCTTGGGCTGGCACACA
GTAGGTACCCAGAAAGTATCAATTGAAACAAATTGAAAGTGGTCTTGATACATATCACAGGGCAAGTT
TGCAGTTAACAGACATTTCAGAGTAAAGACTCTCTGGCTTGGTGCTCGATCGGCTTCTGTGGGTTGTCA
GCATGCTGTGGACAGCCCCGGCATGGGAGCGAGTGGGCGTGTGTGTGTGTGTATGTGAGGGTGAGAG
AGCGTTAGTGTGTGTGTTGGGGTTGGGGAGAGAGGAGGGGGAATAGAAGATGGACCACCCGGGTATC
AGCTTCTGCCCTGGGGAGATGGTGGTGTCAGTTGCTGAGGGAATCCTGAGAAGCAGGTCTGGCTGTAG
GTGGTGATGGTGGTGGGGTTGCATGAGAATCCATTTGGGGCAGGTTGAATTTGAGGTGCCCATGACAT
ATGGCTAGCCATGTTCTGTTGGCTGTGAGGTCAGGAGAGAGACATGAGATGGAAACAGAGGTTTGGG
AACTGTCATGTGCTTAAACCAAAGACCTGGGTATAGGGAGAGTGAGAAGAGAAGGGGGCAAAGATGG
ACATCCAAGAAAGAAGCTGAGAAAGCCTAGGAATTTGAGGTAAGAGGAGACGTAGGTAAATGTGACG
CTTGGTGATCAAGGCTTCTTTCCACCTCTCCTATGCTGGACACTCACGTCTCCTGTCTGCTTGGAAATTC
ATGCTGAGGGCAGGGAAGGTGGGAGCAAGGATTTGTCTAAAGATCTTGCTTTGGATCCCTGCACTCCT
CCTGGTTTACCAAGTGTCACTGGACACGTCAGGGCGTTCTGAGACCTTAGAGAGCATCCAGTCCTGTC
CCTGCAGTTTACAAATGAGGAAACCAGTACCCTGAGAGTGGCTGTACTATCCACTCTCAGGATACCAA
AGATCATCTGGAAAGTCACTGGTGGAGCTGGACCGGGGCCCAGGCATCTCTTCTCCTGTCCGGGGCTC
TTGACTTCAGGACCACCTTTCTGAAACCCATGATGGGGCAACACCAGGACACTTTCCAGCCTGCAGGT
GTCTGTCCCGCGGAAGCGAGCCAGGCCACATGTGAATTCCTGTTTTCTGGGTGGGTTTCAGAAGGTAC
GAGCAAGTCGGCAGGGTGACAGCCCAGGTGCTTCTTGGGTTCCCCAAAACGCGGTTATGTTTAGCAGC
ATCCTCAGAACCAAAGGTGGGGTGGGGGCTGCAGATGTTGTGGGGGCCCTCTGAAGTGAAAAGAGCC
CTGTGACAGATCTTTTCTTCATGTTTTTCACAAGTTCACTGTGCAGCAGGGCCCCCCCAGTAGCCTTTG
CCCAGGGTTGGGTGTTGGGCAGCCCAGGCCTGGCTGACCTTGTGGGGAAGGGTGTGAATGGTGGGAA
TCCCCGAGGGCCCTCTTTGCCCGAAAGCCCTAAGCCTTGACATCAGATGCCCATCAGATGGTCCATCG
GAGCCCTACTACCCAGCTTGCCCAGTGAGAATCATCTGGGCTCCTTGTTAGGTAGCCATTTAGGTCCTT
CCCAAAATCCACAGACTCTCTAAGGGAAGGGCCCGAGATGCTGTACTTGTACTAACTTCCTCAAGCAA
TTCTTGTGATAGGTTTGGGAAAAACTTGTCCAGGGTGACCACTGACTGAGTCCTGGTCTTCTCTGAAGA
GCACAGTGCCTGCTCACTTTAGGGCACCCTGGGAGGTGGGAGCTGGCTCAGCAGGCAGTCTTATAAGG
GACTGAGCTTCAAGGCCTCTGTCCCTCCAGGAGGGAGGTGCATGACCAGAGAGGGAGGCCTGAGGAT
CTTCTTCCCTGCCCCAGAGGGTCTGCTGCCTGAGCTCTGTGATAGCGCAGAGAGTAAAAGGATCAAGC
TTGATTGAGGCCTATCTCTCAATGCGAAAGTTTGCTAGTTAAGAGGAGAGTGGGAAGGGCATTTCTGG
CAAAGAGAAAAGTGTGGACAGGCATGGCTTAAGGGATGGGGAGGGAGACAGACAGAGCTGAGGGTG
AAGGGCCTTTTGCTCAGCTGTGGGCCTTGGCCTTCCCTTGTGCAGGGACACACAGCCTTAGAGCCACT
GGAGGTTTTAGTGGGAAAGTAATATGGTCGGGGCTGTATCTCAGAAGAAAACAAACTAATGGGAACA
GGTCCTGTGATGGTGGACCTGGGTCAGCTACGGAGGGAGGGAAGATGTGAGATGTGTACTGGGGAAG
GGGGTGGAAGTGGCAGCTATCTGGTGAGAGGAAGCAGGCCCACAGCTTTTTTTCTCAAGCTGTTGAAT
TCAGAAGGGCGAGTGATTCCGGGAGTAGGGGGTGCTTGGAGAGCCACGCGTTATTGATAAACAGGGC
AGGCTGAAGCCTGCTCACTGGCCCTGGGCGGGTTCTCACCAGCATGTTTCAGGTTTTGATCTGTGCTTG
TGGTTGGTGTTCCTACCTGTTCTCTAGGTTCCTTCCTTTGTTCTTGTGGCTCATTTGCTTCACAGGTGAA
GCTGGTTACACTAGAGTAACAGTTCCCAAAGTGTGTTCCCTGGAAAAATGGTTCTGTAGCCAAATAAG
CTTGGGAAATGGTGGGTTAAATATAACGAAGGGGGTTTTTCGACTGCACAACTTCTCAGAGCCTTTGG
TGTGTGTCGTGACTTTGCAGAAGCAGGATTTAATACGCAGCATTCCCGTTCTTATTTGACCACGAGACA
TGTTTTTCCATTAAGCATCTTGCTGGGTCTGATGTTTTCTGGAACCCATTTTGAGGCGGTCTGGTCTGCA
GAGAGTATGGGGAGCCTGGGTTCAAGCCTTGGCTCTTGACTCTCAGCAGAGCCTTGATTCCCTGTGTTG
CCTGGACTGCACCACGTGTACCACATACCCGGTATGTGACGTTTTCCTCATCCCTCTTCCCACCTGCCG
TTACCTCACAATCCACAATCTGCACCTCATCCATTTTTCTTCTGAGGCAAGCACTCTCTTACTAACTTAC
TTATCTCATCTGCATCCATGTTCTTCTAGGCCAGAAACTTGGGAGTCATCCCTCCCTCTTTGTTACTTCT
TCTTCCTCTTTGTTACTTTATCCCCTCTGTTACTAAACATTCTTCTGTGTTTCCAGCTATTTCTTTTATTTT
CCCTCGGTCTCCTTTGGGGTTTCTTTGCCTCCATCTCTCCCAGACCTTGGTTCACCTTCCATCGAGTCCC
TTCCTGGGACATGGGCACTCATGCCACTCCTGCTACCTTCCACTTCGAAGCTAACTCCCTCCACACTGA
CGTCCCCAACATGCATGCATACACACACACACACACACACACACATACACACACACACACACACACTT
CCCCAGTTAGGCTAGAATCAGAGAGATGATGTCAGCCATTTGTCCAAGGCCACGCAGCTGGGAGGTCA
CAGAGCTAAGTCTCAACCTCAGGGGTTTTGAGAAATTGCCTTCTCATCCGTGATCACTGATTTCTACAA
CAGCCTGTCAGGAAGTCTGGGTAGAAATTACTTCCATTTTACAGTGGAGTCAGAGCGGGGAGGGTCCT
GGGCAGGCGAGTGCTTCACAGAGTGACCAACCATCTAGGTTTGCCCCACACTGAAGGGGGTTTCTGGG
GATGGTTGGTCACCCTAATGCTGGATGTGGTGCCTGATGCTGGGCAGGAGGGCCCTCTCCGTGGCCAC
GTTGCCTCCCAGGAGGAGACATTTCCTCTGCAGCTGCAGCTGCAGCCTGGCCATCTGATGCAGCCTGT
GGAGCGGTGGCGAGTCCTGTGGCCTGCTAACTTCTCCCTCCCTCCACCTCTCTAGTGGGCCCCATGCTG
ATTGAGTTTAACATGCCTGTGGACCTGGAGCTCGTGGCAAAGCAGAACCCAAATGTGAAGATGGGCG
GCCGCTATGCCCCCAGGGACTGCGTCTCTCCTCACAAGGTGGCCATCATCATTCCATTCCGCAACCGGC
AGGAGCACCTCAAGTACTGGCTATATTATTTGCACCCAGTCCTGCAGCGCCAGCAGCTGGACTATGGC
ATCTATGTTATCAACCAGGTGAGGCCTGGGAAGGTGGAATGAGAGAGGGTGTGTGTGCATGCAGATG
TGTATCAGATGTGTGTGTAATGAGGGCAGGGGAAGGGGAGTGATTTCACAGACACCTGGCACTTACA
GCGAGGAACCAGCCCCCCAGCCACCACCAGTGCAGATGAGGTAAACGCCAAACAGTGTGCTTGCCTA
TTGCTGTCAACTCTATAGCCAAGGGAAATGCTGGAGTGTTTTCGTTGTTCTGTTTTTGTTTTCTGGAAGT
AGCCTTCCAGCAAGATTGGGAAAAAAGACAACCCTAATTATTCCAAAGTACACACTGATTATTCCCTG
GCTTTGTGTAGCTGTGTATTTTCCTTTTAAAAATAAAACCACCATTTAGATGTCAGACTTTTAGGTAAC
TTCAAAGTTTATCCAGTCAGTCAGAGCGTGTCTCCTGGGGCACCTGGAGACAGTGCCCTTAGTTCAGG
TCACATGCCTACATGCCAGCCCCTGGTGAAATATCTGGAGAAGTCTGATTCGTGGGCCATCTGAGAGT
TATGTGGACTGGGCCGAGTCTGAGAAAAAGTTTCTCACTGCTCGTCTGATCCATATGTGTTGGGCTTTA
GCCCTGCTTAGGAAAGTAATGCTAAGGATAGGTCAACTTTCATCACCATGGCATGGAGAATCAGATTG
ATCTAAGAGGCATCTTTATTGAAATAAATTTTTCAGTTTATTTGAGGAGCATTATTTTCCCAAGAGTAT
AACTTTGATATTTCAAGATTACCCCTAACACTTAAATTCATGTTTTTAGACTATAACCTCCTAGGTGCA
ATGACACATCTAACTTATCTAAGCACCCAGTTTCATTGAAATTCATTTGAAGAGTCTGAGTACGCCCAT
TTCTACAAGGCCCAATGTCCATTTCATTTCGAGATAAACTCTGCTTTAGGTAGGAGGATTGTTGGCAGT
TTACGGCTTCCATCAAGGTCAAGGAACTCTGTGCACCTTCCCTATGACCCCAGGGGAAGCACTCGAGG
ACTGCTGTGGCATTGTGCTGCATCACTTGCTGCAGGGAGATTCTGAAGAAGTGTAAGGTCTCAGTCCT
GCCCTGTCCCGAAGCCTCCAACCCACTTCTGGCAAGTGGGACCTTCCCAGGGAACAATTTGTTAACAG
ACCCAAATATCCTGTGATTGGATGGTGGCTGCCAAATGCTTTGGAAGCTCAGAGGAAGGAGAGAGAG
CAATGGCTTGGAAGAACCAGGATATAAACTAGGTTCTAAAGTCTGCAGGGAGATGGGCTTCTCAGCTG
GGGCCAGTGAGCAGGGACCTTAAGGCAGAAAGGAGCCTTGCATGTTCCTGGAAATTGAGATGCCCAC
TGGGGTAGGAAAGCACCAGAAGCTCTGGGACCAGGTGTCAGAGTTAAGCCTGTGAGGCAGGAGAGAG
CAGAACAAGCCCTGTTACAAGGAAACTGAAGCAGGAGAGCAGGTGGTGGGCAAACCCCTTGAGGCTG
TTTGAATTCTTCGGCCAAGTGAGGTACAGACCAGGGCCCTATGAACACCTGCAAGCAAGACAGCCACG
CAGTTGTGGGTCACCTTGGAAGAATATTGGAGAATGCAAGAGAGAACAGGTAAATGTCCTGCAAAAT
GCGGGTCACTTTAACCCAACACATATTCATTTAAGAAAAGCTCTGTGATTGAGAAACATTTGTCTGAT
GCCAGTTAGCACATACCAATGACGGCAAGATTCAGGAGCCTGTTATTAAAGCAGTGGCAGCGAGCAC
CTGGAAGAGGCGGCCACCATCACCAGGAGCCAGCAGGGATGACTAATAAGCCGTGCCAGCTGCATCT
CGTTTCTCTCTTGACAGTTGCTATGCCAGTAGATGAGGGATGTACTGTGGATACAATGCTGTCATATCT
TATTCAGCAGGGCATCTGATAGCATCCCACAAATCTGCCTGAGTAGAAGACAGACAGCTGTGGTCTGG
GTGCCATATAGGTAGGTTAAAATATATATTTGGGCCTAGGCGCAGTGGCTCATGCCTGTAATCCCAGC
ACTTTGGGAGGCCAAGGCAGGCGGATCACTTGAAGTCAGGAGTTCAAGACCAGCCTGGCCAACATGG
CGAAACCCCGTCTCTACTAAAAATACAAAAATTAGCTGGACATAGTGGTGGGCGGCTGTAATCCCAGC
TACTCGGGAGGCTGAGGCAGGAGAATCTCTTGAACCCAGGAGGCAGAGGTTGCAGTGAGCCGAGATC
ATGCCACTGCACTCCAGCCTGGGCAACAGAGTGAGACTCTGTCTCAAAAAAATAAAATAAATAAATA
AATAAATAAAATATATACTTGGGTAAAGAGGATAAAAGAGTTAGCGATGATGCTGAATTTTTGAACTG
AGGTGGCTGTTTTCAAGGAAGACTGGAGGGTGGGATGCTACGTCTAGATATGTTGCAGTTTAGGTGAA
TGTGAGACTTCCCTGTTTTGAAGTCAAATATTGGACCAGTAAAATCTAGCCATCAGCTTAAATTCCTAT
GATACAATTTACATACTCCCCAGGCTCAACACAGTAGATTTCTGAATGTCCTCTGCCAGCTACATGCTC
CTGCCCACCTCAATCCGAGTAGATGGAACAACTAACCAAGCCAGCTCAGACCGGTGGCACAGCTGTGC
TGGCTAACACTGGGCACCACCTAAGAGAGTGCTTCTCCAAAAGTGTGCTTCCCCAAATGGAGCGAAAT
ACGCTTGAGGAATGTTGGGTTGAACCATGTAAAGCAGGTCTCATTCCCGCAGAGCCTTTGGTACCCCG
GTGTACACTGTAACCCCAGAAGTGTTTCCTGAGCTTGCCTGACGAGACAACTTTTCCAAGAACCGTCTC
AAGTGATGAGTGTTTTGTGAGTCACACTTTGGGGAAAGCGGGCCTAAGTTAGCATCTCCTCCCAGCTG
CCTCCCTGCTTTCCCTGGAACACTAGGAACTGCCCGTCCTCCCTCCCTCCCTCCTCTTCCCACTTCACAA
CTTAGCATCAGGAATATTTTAGTTTTGGTTTTTCAAACATATATACCTCCTTTTTTCTTATCTTGTCAAT
ATCATCTTTTTTTTTTCTTTGCTTTTCCTCATACTTTTTTTTCTCTTCATCCTTTCCTTCTCCAAGGGTTAA
CTTTCCACCTTAGGAGAATCTTTTCTGCTTTTTCTCCCACTTCCCCAGCTACTCTCTTATCATCTGCTCCA
ATCTCACCCTAATTGATCATTTTGGGAAAATATGGTCAGAGTCCAGATAACTAAGTTGAGAAATGCTT
AAACTCTGCCATACCTTTCCAGTAAAGAATATTACCTAATAAATAATAAAATGGTAATGGGAAACCTG
AACCCTGAAAAAAAAGAGGTGGAAGGAGAAACATTTGGAGCACATCCTGTCTACAAATTAGGAACTG
CCTGTGTTATCTGTTTTATGGTTATATTCTAGAAGAAGAAAGGGATTTTGTAGCACCTGGTTTTGACCT
TTCTGCACTGTTTGTTGAGCAAATAAACCTTATGGGCTGTTAGCCCTCTTTATAGCCTCTCAGCTTATCC
CTGGCCCAGACACCCTGCTGTCATTTTGACTTTTCATTCCCACACACACATACACATGCACACACATGT
ACACACACACACATACCATTTAAGATTAGACAGAAGTAATGCTCAAAATGGAGTGGCTTCTGAGACAT
TTAGTCCAAGGGTTCCCAAACAGGCTTTTCAGTATCAGATTTCTTTCTGCCCCATTGAAATGCTACACA
ACCTTCCGCTTACAGCAGGTCACAAGGGTTTCATTCTACTTGAAGTAGGGGCCATGTCCCATTTCCACT
TCCTTGGCTTCCCATTCAGTCACTGCTAGGATTTGCCTAGACCCCTGAGGCCAGACAATGTAGAAACTT
CTGCTCCATGTCACAGGTGAGGAAACAGGCTCAGAGAGGGACAGGCTCCGAAAGTCACATAGACAAC
AGTAGGGCTGCGGCTCAAACCCCAGCGTCTGACTCCAGGTTTAGTGCCTTCTCAGGGCATCAGTGACA
CTCCTCATGGCCAGGGTGCCCCCAGTGTTGCTCACAGTCTGGTATCCAGGGCTGAGAGTGTGCTGTGT
GCTCAGACTGCCTGGGTTCAGTCCTGGCACTGCCACTTTACAGTCAGTGACCTCAGGCAGGTTACTTAA
GCTCTGCAGGCCTCAGTTTCCTCCTTGGTGGGGAGGGTTATGAGGCATCCTTCTCATGGTAAACCTTCA
GTAAATACCAGCCGTTACTAGGAGGGTCCACTCCTGCCTCTCCACTCTCCATTCATCCTGCCTGTTTCC
TCTGCCTGCTTCCTCTGCCTGCTTCTGTGGTGGTGAATTCTTCATGGCTCCCACCGCCTCCTGCTGCACC
CCCACTCAGGGCCCGCATCAGGACCCTTCCTCCTATTGGTTTGAACTCCTTGGAGTCAGAGGGTAATG
GATAGTGGAGTGAGCCAGGTGGCAGAATCTCAGAGGCCATCCCGGGCCTATAAGCCTCTTCAAAATA
GGGCCACGTATCAAGCTTTACACACAGGAGTGAACTTTCACAAGTTGTTATGACTCATACTCTGTCTAT
AGTAAGCTGTTAACCACTCCCATTTGGCTTATGCCTCTGTAATTATTGTACTAACTTATATCTTAAAAT
AAGGATATTGAAGGAATGAGCCGGGAGAGGCTTTCCTGGTTGAGATATAGAAGAACAAGAGTTGCTC
TTTTTCCTTAAGGTCTCTCCTCCCACCCCTGACCTTAGCTCACCAGCATGGGAGAATACTATTTGACTC
CTTGTACTCTGAGACGTGGATTTCAAGATATAGCATTCCAACTTCAACGGCAGCAAGAAAAGAAGCAA
CAGAAGGAGAAGACATCATAGCAAACAGGGATGCATGCTGCATTTCCTAATACTCAAACCCGGAAAC
GAGACTTCACTCAAGGTGAAGGGAGGGCAGGTCACCACCTGGTAGCACTAGCCCTAAATTAAGGAAT
GCAGAATGTTTGTGGGATTGCCCATCATAAAAATTACAAAATGAGTAAGGAATGCAGGCACAGCTGG
CCAGGTGGGTTTGTCACAACCATGGCAGCCCTTTGCCCCACAGCCAGTACACAGAACTGGTCTCTCCA
ATTCCGATTGCATATCTTCTGGCACCTCTGTTCCTCTCCCTCAGCTGCCCAGGATTTTTCTGGTTCTGAC
CATGTTACTTCCTCTTTTAAACCTGTTAGCATTTCACGACTGCCTACAGGCAACGGTCTAAATGGTCGG
AAGGCCCAAGCTTAGCATCCGAGACCCTGACCTACCTCCAGCCACTTCCTCCTCCTCTCCACTTCACTG
GACTCCCCATCTCCACCCAGACACCTCTGTTCTCCCCTCTGTGTGCCTTTGCTTATGCTGTCCCCTGTGT
TCCTAGTGTGTCTCTGGCTATCTTTTAAGCTTCCCTCCCCAACCTCATTAGTTCTGTGGAGCCCCTGGAA
TAGAGCTGACTTCTCCTTCCCTGCTGCTCCCAGGCTGCTCAGAACTTTCTGGAAAGGGATGATTATCTG
AGTTCCAGCCTCACCCCAGCCCCCGGACTCTGAGTCCCTCATGTCTGCCTCCCTTCTTTCTCTCTGACCA
CACAGCTGGTACATAGTCAGTACAGACGCAGTCAGTGAGTGGAGCACGGGGCTTCTCTCCAGGATTCC
TGCCCCTTTGTTTATCCCTAGTCTCAGGACTCCCTACTCCTGGTCTTCTGCCTAAATCTGTGCCTCTTGG
AAGTGAAGCCTCCGTTCCCAGTGGGGCCAGGTCCTGACCCTTGGGAACTTGCAGGATCCCTCCCTTGG
GCCTCTCCCCGAAGCTTCCAGCTCAATGCTGACCAGAGCACAGGCTGCCTGTGACAGTCCTTGGGGTG
ACCTCCCTTATCAGGAAAAATGCAGAAAACCTATTAATACCTTAGCCTTGTGATTGTTAATGGTCACA
AAACTCCTTTAGGGTCCTTTGGACTCAGCACCTTTATGGTCTCACTTTGAATTTTGAACCTCCCACCTCC
CCCCATCCCCCAGAGTAAGGCAAATGGTCTTCTGATTGTTCCTGCAGAGGGAAGGCTCCACAGGTAAG
CACACGATGGCCAGGAAGCAGAGCTGGAGCCTGCCTGAAAGGCTGTGGAGAAATGGAGGGAGGGCT
GCCCTGAGGACTCTGTCTGGCTTTGAAGTTTTCTACTGTTTCCTTTTCTTCTGTGCACTGTTTTAGGATG
ATGGGGTGATAGTTCCAGGCTGGTTGAGGATGGATTTGGAGACAGTCCTTTGTACCCTCAGTGAGCAA
GAGTATCTGTCACCCTACCTCAGCAGTTGTCTCTGTCACTGGTCCAAGCAGCTGGTTCCTACACAAGGT
CAAGATCAACTGGGGAGAAGCAGACTCCTGGGTCTATCCCATTAGTGAGGACAGCTGCCTGGGCTTAT
GGCCTCATTGGTTTGGTTTCTATCTTGATCATCTCTACCATCCCCCCATCCCGGCCTTCCATTTTCTACC
TCAGCTGTCAGTGCACAGATTGATGTGTGTGGGAACGGAGCTTGGGAGGAGTGGGGTAGGGCTGGTC
CTGTCCTGTAGCCTCCCCTTCCTTCGGGCACTTGGACCCTTTGGAGCTTGCCGGGGTGGGGAATGGGAG
TGGGAAGGCCAGGGAGTGTCTCTGCACCATCACTGTTTGAGTGTTGCCCCTTTGCTGTGTGCCCCACCT
AGTCTATGTGTGTCTCTGTTCTCTGGGGACTCAATTTGCTGGTGAATTGCTTCCATGGACATTGTTCTGG
GAAATGCCATTTTTTCTGCTCACCCATGACTCTGTGACAAGGAATGACAGCTTATTAGGAATTTGTTTT
TGCATTGGAACAGTGGTCATCAGAATGGGCCCCTTTTCCCTTGCAGCTTTGACATTTGCCTCTCTTTTCC
TCACCTCTCTCCCTTGCATCCACCCTTTTCTCTTTTTCTTCTTTTTTGTTTTCCTTCTAGCAGGGGCCTTTT
ACCTTTACTTGTTAATCCTGTTTGTAGCAAAGCAAGTGGAAGGAGGAGTTCCTCTCTGATCTGCTTCTT
ATTCTCCACCTACCTTCTCTTCTGTACTTTCCGCCTCCTAGAGAGAGAGAGAGAGAGAGGAATGCCGA
CCTAACTACCGCTGCCACTGCTGCTGCCACCACCGCTGCCACCACCACCCTGGTAATGTTCACATGTCC
TCAAATCAACCCAGAGCCAGGGCCCTGCTGGTCAGGGGGAGGCTATGTAAATAATCCCATGAGTGTGC
CATCCTCAGGCCCTGGGGTCTCCTAGGCAAGACCAGGGCCTCTGTGGGCTCTCTCGGAAATGCTGAGG
TTGCTGGAAGCCAGCCCGTCATACAGGGTCTGAGAGTTTAACTTCTTTTAAATTAAACCACAGTTGAG
CTCATGCTGTGTGTGTATAAACTTTTGTATCCTGCTTTTTCCTTAAATTCTTTATCATCAGCATCTTCCC
ATGTTATTTCATAGTCTTCATCATCATCACTTTCCATACCTTCATAGTAGTTGATCGTAGAATTCCATCA
TAATTAACTTGTCTTTTCTCTCTTAGAAGTCCCTTAGGTAATGTCCAATTTTCCGTGAGTGTAAGTAATA
CCATAATGAACATCTTGGAGTCTGAAGTTTATTCTGTGTTGGTTTGTTCCACATTTAGGATCATTTTCCC
AGGCTAGATTTTCAGATGTGGGATTATGGGTTCAGATATGGTTTACACATTTTTATAGTTCTTAATACA
GATGGCCAAATTGCTTTCTGAAAGAGAAGCTTTTCTTAAGTATTTTTCTCCAACTTGTATCTTAAACAT
CCTGAACATGCTTAGCACCACTGTCTTGATATATCTGCGGAAAGCCACGTCTCCACTTTTCAGTGTGTC
GGGCCCTGGGAGAGGCAGGCATCCTGCGCTGGCTCCTTGGAGCTGGGTTTAAAATTGTCTCCTCTGGC
TGGGCGTGGTGGCTCACACCTGTAATCCCAGTACTTTGGGAGGCCGAGGTGGGCGGATCACTAGGTCA
GGAGATCGAGACCATCCTGGCTAACATGGTGAAACCCCGTCTCTACTAAAAATACAAAAAATTAGCCG
GGCGTGGTGGCGGGCACTTGAAAAGTCCCAGCTACTCGGGAGGCTGAGGCAGGAGAATGATATGAAC
CCGGGAGGCGGAGCTTGCAGTGAGCCGAGATCGCGCCACTGCACTCCAGCCTGGGCGACAGAGTGAG
ACTCCATTTTAAAAAAACAAACAAACAAAACAAAAAAACAAACAAACAAAAACTGTCTCTTCTGTGC
TCACTTCACCCAGAATCCCTGTTGGGCTCTTCAAGGAGCTCAGTTCTCTCTGAAAGCAACTTTATAGCC
TCAGTCCAGTCTGTGTTCCTGTGTGGCAGGGGTCAAGGGTATGCTCACTCTTGAGAGTGGTGTCTTTGG
TTGACCAAGAACCACTCCCATAGCCTGGTCCCTAACCCTTGAAGGCCCATCTCTCTCACTCACTGGGGT
GAAGAGTTTAAATCTCAGATCCAAGTTTTGTTGAGAGCTCTGAGCTACCATATTGCTATGGTTAACAAT
AGTTAACAATGTTAACAATGGTTAACTATGGTTAACAATAGTTAACAATGTTTAACAACTAGAGCCCA
GCTGGGTGTGGTGGCATGTGCTAACAGTCCCAGCTTCTCAAGAGGCTGAGGTGAGAAGATTGCTGGAG
TCCAGGAGCTCAAGGCCAGCCTGGGCAACATGGCGAGACCCTGTCTCCCCTGCAAAAAAACAACAAC
AACAAAAGCAAAACTAGAGCCCAACTGCTGTGAACTCATGGCTGAGTAGATATTATTAGCCCTCCACA
AACTCAGCATTTGTATAATCCCAGGCTGTTTCCAGTAATTCTCTGGGGATCATCTCCCAGCCTGTCCAC
TGTTCCAGGATCCACACTTAGGCCTATAGGAATGCCCCGTCAGAGCTTCTGCTGCCGCTGATCTGTTAC
TGTTTCATGCAACCCACTCGGCCTAGTTCCTTCCTCTTACTGTCTCAGTGGGCACAGAAAAGCATACAG
AGGGTGTTTCAGCAAACATTGCCACTGGCTGCAGACCTGCCCCCGGATCTGTCCTGTTGAGAGCTTAG
TGCTGCGTTCTTGCATGGTGGGGAGGGGTGTGGCTCTGTGATGAGCCAGGGCATGTGTATAGGAGCAA
CAGTGTCTCTCTTATCACGTAGAAGTTCTGACTCATTGCGAGTCTTGGCTTTGGGTTAATGGTTCCAGC
CATGTTGCTGCTGTGTCTTTTGGTGCAGGAGAGGCTGGGCACAGTTGGTCCCTAAGCCATTATGGATA
AGGGATGTGTCTGCTGATATACACACATGGACCTGACATCCAGGGAAGGCAGGGTGATTGGACAGAA
CAGTTCTTCCAGAAGCTGTTGGAACTTGGACAAGAGTGGCCCTTGGCTTTCTGTAGTTGGTCATCTGTC
CCCTGTTGCAATCAGGGGAAGGCCACACTTGCCTTCCTTAACCACAGTTAGGATTTTCTTGGGGATTAG
ACCAGATTCTAGCACCTGTCCTGAACCTCTCGCCCCGCCCCTACAAAGGCTGCTTGCAAGTGTAGTGC
ACATACACAGGGAGCAGGTGGGGCATGGAAGTGGAAGTGGAGCCCCTGCCTTTGGCCCTTGGGGGAG
GCACTGTCTGCTTACCCACGGTTGTTGCCTCATAGGAATCATACAACAGCTTCCTAACTGGTCTCCTTG
CCTTCAGTTGGATTGGGGCACAAATCCCTCCTTGACATATAAACCATGGTTTAAGGCTCCCTGTGGCCT
AAATAAAGATAAAGCTTAAGTATCTTAACAAGCACCTAACCCTTCTCCCCAGCCTCGGTGATTTGGCT
CATCGCTGCCTTCATGTTTCATTCTGGCTTCACTCATTCGGAATTTCTTGTAGTTCCTTGGCTGTTCTCTT
TTCCTTACCGCCTTTACAAATGCTCTCACCATGCATGCTTTTCTCTGCTCCTACAGATGCCTTCTCTCCC
AGCACCGCCTCCAGAGTCTATGTCTGGTCGATTCTGTCTGCTGTCTCCAGTCCCCATCTTGTGGCAGTC
TCTGCTCAATCATTTGGGGATTTTATATGTTTTCTGGCCTTTCTTTTGGGGGCCTGTCTTCTCCTTCTAA
AAGCAGCCAGTTGACCTAGAAGGAAGGGATAACTGTAACTCTTGTCTACCAACATAAGATTAGGCCCA
CCCTTTAAAAGCTGCGTCTTTGAAAGGGACACCTGCACCCAGCATGCTGGCTTCTCTTCACCAAGCGTG
ACTTCCTACGCATTTCACAGGCCTCCAGAGGTCCCCCTGACTCTCTTCTGCTGTGAGAAACTCTAATCA
TGTAAGCCACAGGCTAATTCCCTTGAGCCTTAAATGTTTTTAGTAATTTCCCATTCATCAGAGAAGCAG
GATTTGGGAGGAATTTTGAAGCAAACACTACAGAAGGCAGAGTCTCCAGGTAGGATATCTAAGAGAC
ATTTGGAATGGTCTGACTGTTCAAGATGGATGGGAAAGCCTCTTCCTGTAATGATAGTAGCCAACATT
TGTTGTCAGGCAGTGGGGCCCCATTTTTGAGATGGGGTCTCTGTCACCCAGGTTGGAGTGCGGTGGTG
CTGTCATGGCTCACTGCAACCTCAGCCTCCCCGGGCTGGGTCTTCTTAATTCTGAAAAACCCAGCTTTT
AAAGGGTGGACCTAATCTTATGTTGGTAGACAATGTTGTCTCATTTAATACAATGCACATGCTCTCCCC
ATAACACAAAAGAGGGAACTGAGGCCTGGAGGTGTGATGTACCCCAAGTCACATAGCTAATAAATAA
AGAAGCCAGCATTCCTGGGATTAAAAATGCATGTGTCTGTCACTGTGGTGTATTTGGTGCTTGATCAAT
GTTTACTTGAGCAAATGGAGGGGCAGAGGTACCGATGAGTGTGCTCAGTGAGGAGGGCAGGAGTGAA
GCTGGGCGTCTTCCCGCCTCTTGTGAGTGGTGGGGCTTGGTGAGCTTGCCAGGGCCTGTCTTTCTTATC
AAAGAAGGTGTGTGCCCCAGTGTTACAGCATTTCACCCAAAGCAGCCTAGAAAATGCTTGACTTTTCT
GTCATTCCGGGGAGGACACTTTCCTCCTCCACTGTTCTGCTGGCCTGGTGTACCCACGGCCCCTGATAG
ATGATAGCACCTGCTAAAGTGCACCATGCCCTTCCGTCTCACTGCATCCCACAGATGAGGCCAGGCTG
GGATGAGGGAGAAAGGGAGGGATATATAGTTCAGGTTATTTTGGAAAACTGCCTGACCAATTTTAAGT
CTGGGCCGGACACTGGGGCATCTCACCACGTTGAAAGGGCCGTGGCACCCCGGGCGGTGAAAGGGGC
TGGAACCAGGTCTGCTTCTTGGGCTTCTCCTCCAGGGTGCCATTGCTCATGGGCCTTGGCTGCAGAGGT
GCTCATTCGTGGTTCCAAAATTCCAATTCCTGGGAGAGGAAAAATGCTTAGTTCAGTCTCAGTTAGGC
CTCTGCTTAGATCAAACAGCCAAGGCCAGTAGGCCCAGTCCTATGGTAGAGACATGGCCTCAAAGAGC
CCTCTGCTGCAGTTGTTGGGGAGTGTACCAAGAGAAGGGAGCATTGTCCTGGGCTGGGCAGCCCTGGG
GGTCTAGTGCATAGATGTAGAAAGGCTCTGTTGGTATACCTCCCTTTGCTTGTTGGAAAGTGCTCAACG
GGGCTGAATTGTGTTTGACAGTGTAAGTCTGGGCTGGGGTGAGGGTTGTTACAAGATTGTCAAGATGA
TTAAATGAAATGCCATTTGAAACACTTATCCATGCCTTGTGTATGGTATCCCCACCAGTGAATATTCAC
AGTATATTATAATAATTCCAACAACTTCATAATTTTCATATGCAATTTCTAAACTTTGAACTTTTTTTTT
TTTTTTTTTTTTTTTGAGACAGTGTCTCGCTCTGTTGCCCAGGCTGGAGTGCAGTGGCGCAATCTTGGCT
CACTGCAACCTCCACCTCCCGGCTTCAAGTGATTCTCCTGCCTCAGCCTCCTGAGTAGCTAGGAATCCA
GGCGCCCGCCACCACACCCAGCTAATTTTTGTATTTTTAGTAGAGACGGGCTTTCGCCATGTTGGCCAG
GCTGGTCTCAAACTCCTGACCTGAGGTGATCCACCGCCTTGGCCTTCCAAAGTGCTAGGATTACATAC
GTGAGCCACTGTGCCCGGCAATTTTTTGTGTTTTTAGTAGAGATGGGGTTTCACCATGTTGGCCAGGCT
GGTCTCGAACTCCTGACCTCAAGTGATCTGCCCGCCTCAGCCTCCCTAATGCTGGGATTACAGGTGTGA
GCCACCACGCCCAGCCTAAACTTTGAATTTCTTTGAACCCATGACTTACACAGAATTAGCTGAACGCA
GAATTCCAAATCAACTCAGCCTGTGGGACAGCCAAAAAACACAGTGTGCCTTTGGGCTCCTTCACTCA
CCACGCGGGGTTAGAAAACTTTGTCAGAGGCTTTAAAAAAGGAGCTCTTGTGTGTAAAATGTTTCCTT
GATTCTCTTTCTGGTGCCTCTCTTTCTCTAAGTGGTTTGCTTCCCCAAGTTCCCCACCTGAGTCTGGGTG
GCTGTGGCACATCTGTGCATTCTGTACGCACACAGGCAGCCTTTTGGAGTGCCAGTTTCCAGGTCTTGG
TTTTATTTATTTATTTATTTATTTTTTTGAGATGGGGGTCTCACTCTGCCGCCCAGGCTGGAGTGCAGTG
GTGCCGTCATGGCTCACTGCAACCTCAACCTCCCTGGGATCAGTTGAGCCTCCTACCTCAGCCTCCAGA
GTACTAGGGACCACCATGCCTGGCAAATTTTTGTAATTTTTTGTAGAGGCAGAGTCTCACCATGTTGCT
CAGGCTGGTCTCGAGCTCCTAGACTCAAGTGATCTGCCCACCTTGGCCTCCCAAGTGTTAGGATTACA
AGTGTGAGCCACCATGCCCAGCCCAGGTCATCTTTTGAGGGCATGGAGAGAAGACTTTGAGCATCCCA
CTTTTGAGATTGTGTACCAGTCGCAAGCCCCTATGACACACTTTTTCCCCAAAGTAGAGGGCTCTGACT
ATGTTGATCCCAAGAGAGATGGGAAAGAGCATTGAATGAGGATTCCAAAGTATTGGGCCTTAGTTCGT
TTCCTCATGTTGGTGTTGTGAAGATTCTGGTTAGGATAACAGCATGTGTGCAGGAGGCTTTGTGAACTG
CTGAGAGTGAGGCGTGGCAATGTCAGTGCTAGGTTTGTCCTTACTAACCTGGGGCCATGGGAATTGAT
AAGACCAGATTCCCAACTCTACCCCACAATGTGATCCCTGTGGTGACCCCTCACAGGGCTCTTTGGTCG
AGCTTCCCAGAAGGGATCACCATCTGCCATTGTATGTTGAACCCCATTCATTCATTCATTCATTCAGCC
AACCAGCAACTATTTGTTGAGCTCTTATTGTGTGAGAAGCAGTCTTCAAGGAACTGGGTGAATAAAAA
AAACAAAACATCCTAACCTTCATTGAGCTTACATTCTTACTGAAAGAAAACAAATAAAACATACATGT
AATCCTAGCACTTTGGGAGGCCAAGGCAGGCGGATCACTTGAGGTCAGGAATTTGAAACCAGCCTGG
CCAACGTGAAACCCATCTCTACTGAAAATTAAAAAAAAAAAAAAAAAAAAGCCGGGCATGGTGGCAC
ATGCCTGTAATCCCAGCTACTCGCGAGGCTAAGGCAGGAGAATCGCTTGAATCCTGGAGGCAGAGGTT
GCAGTGAGCCAAGATCATACCATTATACTCCAGCCTCAGTGATGAAGCAAGACTCCATCTCAAAAATA
AAAAATAAAAATAAAAATATGCATTCCCTTTGCACCAGCACACTTGGTGCCTGGGGACCTCGTGGTTG
GCACCCTGAAGCAGGTGTCCCTCTTCTGTCTTGCACACCTTGCTTCTGTCCTGGTGTGTATGGCATGGC
CTTCTGCCCTCCATGGTGAGCACTGTGAGGGCAGAGGTTGAGTTGGGTTTGCTGTATTTCTCAGGTGCC
TAGGTTTGTGCTTGACAGGTAGATGGAAGGCACACAATGTGGTCATCAAACCTCAGTCAACCATATAA
GGAAGGTAGAAGTGAAAAGTCCCATAGGTACCCAACTAATGTCACCAGTTTCCTGGATACCTTTCCTG
GAGTTTATTTATAGTGTGTATAAATAAATGATGTATGTGTTTAAATGCCTTTTTCACCTTTCCTTTTAGA
GCTGCCTCTTTTTAACAGTTCCATTCCATTGTATGGATGTACTATGATTTATTGAACCAGTTCCCTACTG
ATTATTCTGTTTTTTGCAGTCTTTTGTTATGATGAACATTCCACAGTGACAATGTTGTTCATAGTCATTC
ACACACATGCAAGTCCTTCTGCAGGATATATTTCTAGAGGGGAATTGCTGACTCAGAGGTTTTGGTAC
TCTGTGTTGATTGTAGAGTGACGGCAGAAAAGTGAGGCCCAAGAGTTTCCTAGTGACCATGTGTAGTG
GACAAGTCACCAGTCCCTGTGAGTGTTTGGCCCAAAGGCTTTAAGGCATTTGATATCACTGTTTTTGTT
TCTGCACCAGGCGGGAGACACTATATTCAATCGTGCTAAGCTCCTCAATGTTGGCTTTCAAGAAGCCTT
GAAGGACTATGACTACACCTGCTTTGTGTTTAGTGACGTGGACCTCATTCCAATGAATGACCATAATG
CGTACAGGTGTTTTTCACAGCCACGGCACATTTCCGTTGCAATGGATAAGTTTGGATTCAGGTAAGAG
ATACTCAGTCAGAATCTGTGGTAAACATGTCTCTCTCATGTGTTGACTAGGAAATGCAGTCCTGGCAG
CTCAAGAGTGCCTCTTTAAGCTCTGGAGCAGAATGCCTCCTCTGAGAAATGGGTGCTTTGTATTAGTTG
AGATGGAAAGAAGAGACCAGAAATGCCTGTAGTCTCTGCACATCCAGACAAAAACAAATTTTCCCCC
CTTTTTTTTTTTTGTTTGTTTTTTGAGACAGGGTCTGGCTCTGTCACCCAGGCTGGAGTGCAGTGCCGTG
ATCTTGGCTCACCGCAACCTCTGCCTCCCGGGTTCATGCCATCCTGTCACCTCAGCCTCCTGAGTAGCT
GGGACTACAAACACTTGCCACCATGCGCAGCTAATTTTTGTATATTTTGTAGAGATGGGGTTTTGCTGT
ATTGCCCAGTCTGGTCTCGAACTCCTGAGCTCAAGCAATCCATCTGCCTTGGCCTCTCGAAGTGCTGGA
TTATAGGCATGTGGCACCATGCCTGGCCTAAGAACAGTTTTTAGCATTTGGGAGGGGCTCTCATCTTTA
AGCTCCAAATGATACTGTATTTTCTTGCTTTTTTCTTTCTCTTGCCCCACAAGTTTTGGAAAGTAAATTG
GAATAGTTTTCCCCCACTGAATTATTTAGCTTGTATACCTCAGCAGATGTTCCTTGGCCTGTTTTGTTTT
GTTTTTGAGACAGGGTCTTGCTCTGTCACCCAGGCTGGAGTGCAGTGACACAATCATGGCTCACTGCA
GCCTTGACTGCCTGGGCTCAATCCATCCTGCAGCCTCAGCCTCCTGAGTAGTTGGGACTACAGGCATG
AGCCAGCATGTCCAGCTAATTTTTTATTTTTAGTGGAGATGAGGTCTGGCTATGTTGCCCAAGCTGGGC
TTGAACTCTTGGGCTCAAGTGATCCTCTCACCTCAGCCTTCCAAAGCATTGGGATTACAGGTGTGAACC
ACTGCTCCCGCCCTTGGCCCTATAAGAAGGAATGTGATTCTGTTTTCCAGCAGGGCACAAACTTCTGCT
TAAATACAAAGCCCAAATTTTTCCACCAAAATGCCCCTAGTGAAGTGGCCAGCCCAGATGCCCGACTA
GCGTATTATCCAAAGCATATTGTCATTGGTGGAAAATGGCCTTATAGTCCATTGTTTTGTCTTAAAAGT
AAATATATAAATAAACTTGTATATTGTTTCCTAATTCCGTGTTTATATTAACATAAAAGTGTTTTAAATT
ACCTGTCAGTGGCCAGGTGCAGTGGCTCGTGCCTGTAATCGCAGCACTTTGGGAGGCCGAGGCGGGCA
GATCACCTGAGGTCAGGAGTTCGAGACCAGCCTGACCAGCATGGTGAAACCCTGTCTCTACTAAAAAT
ACAAAAATTAGCCAGGTGTGGTGGCAGGTGCCTGTAATCCCAGCTACTCGGGAAGCTGAGGCAGGAG
AATTGCTTGAACCCGGGAGGCAGAGGTTGCAGTGAGTTGAGATCGCGCCATTGAACTTCAACTTGGGC
AACAGAGCAAGACTCTGTCTCAGAGAAAGAAAAAAAAAAACCTATCAGTTGAATAACAAAACCCTTT
CCTTCCTTGCTTTAAGTGAATCTGAAGATCCAGGAGCTGTGCTGCAGGTACCCTCTATGTTGGGTACCC
CTGGTTTAGGCTGACTAGTACAGTGTGGTTGGCTCATGTAGACAGCAGACCCTTTATTTTAGATACAAC
TTTTTTTCTTTTTCTTTTATTTTTTTTGAGACAGAGTCTTGCTTGTCACCCAGCCTGGAGTGCAGTGGCG
TGATCATGGCTCACTATAGCCTTAAACTCCCTGGCTCAAGTGATCCTCTCACCTCGGCTTTCCTAGTAG
CTGGGACCACAGGTGTGGGCCAGCACCCCTGGCTGATTTAAAAAAAAAAAAATTTTTTTTTTTAGAGA
TGTCTCACTATGTTACCCAGGCTGGTCTTGAACTCCTGGGGGCTCAAGCAATCCTCCTGCTTTGACCTC
CCAAAGTGCTGGGATGACAGGCATGAACTACTGCACCTGCTGAGATGCAACAGCTTTCTGTCAGACTC
ATTTTATTCTCATCATTTCTTCCTGTCCTCCCTTGCTGGGAGCATGAGAGCTGTGATGGGAATATAGGA
ATGTATGAAGTCCTTCTCCCAGATCAAAAATCCTAACTTCTTGTCTTAAAGGGAGGAAAATTTGAATGT
AACCTTACTTTTAGACTCTTCAGAAATCCTTCTATACCCTTCCGTCCCCGCTTTCACCCTTCCTCCCTCT
CCGTGTGTGTATCTTCTTCTCTTGAAACACACAGGTTTATACCCTGACCCCTCTTGATTCATCCCTTGAA
GCACAGTGGTGAACAAGGAAGGGGCCCGTGATGCCCTAATTCTTTGCCACAGCACCATGTTTGTTTCA
CAAGGAGCCTGGCAGGTTTGGGCTTGGGGCAGATAGGGGAGAGAAAGCAGCAGAGACAGCAAAACC
AAATCATGTCAGCTTGGCATGTACTTCCCTCTGAAATAGCTAAGAATCCATTTCTGTAAAAGCACTGAT
TATCAGAAAACCTTATTGGCCTGGCCACCTTTGGTTCAAACCCTCACATTAATAATGTGGACAGTAGTA
TGAGGTGTGCCAAAGGTGGATGACTCAGCACCTAAGTGATGACACCTAATTACGAATAGGTTCATTAA
AGCAGACCCCCTGGGGACCTTTGCTTGAGGATCCTTACAGTCAGAATTCCTGAATATATTTGAAAATA
ATAATTGCATCTTTATTTTCATATGTTCTGTATGGTTTGGCTGACTTCCCCCTCAAAGTCTGAGTTAGAG
TTTTCCTTAATTTATGTGATGGGTTTGGTCTTTTTGGATTCCAGAAAGAGCTGGGTGTGGTTTGGAGCT
GCACTCAGAGTCACACAAAACCACAGCCTTTAGAGAACCCACAGGAAGGCTTTGGGGCACGTCCTGA
TTCTTGACATTTCTCATCAGTGCTGACTTTGTATCCCTTAGGAGTTCACAATTCATAACCACTGAAATA
TTAAAATACAAAAAGTTTTGGAAGGATGAGAGCCCAGATGCTCTACTACTTGAAAATATGTTAAAACA
TAAGTTCATCATTATACATTTTGCTAAATCAGGATAAAGTCTGAAGTTTCAAAGAAGTTTTATTTTAGC
AAATTTTCAGAAACACTGCCTCAACTGTTAGGGCCAGTGTTCTAGTCAGTATGCCTTTGGAAGCATGA
AAGCTGGATTGGTCGATAGGATGGGTGTGGAAGGGGGGCTGTGACTGGGTGGGTACAGAGAGGCTCT
GAAACAATCTCAGATTCCAGGAGTTCCTGGATAAGGACTTCATGTGCGGGAACAGAGCACAGGAGAA
GCAGATTCCTGAGCCACTCAGGAAGAACTGGGCCTAGGCCTGCTCTTGTCACTGACTGGCTTTCTACAT
AACCACAGAAACAGCACTGTGTTGTAGAAAGAGGAAGATCATACTTTTTGATATCTGTGTCTAATTTA
AGGTCATCTGAGCCCTGATAGAAAAGCAAAACAGACAAAACCCTTGTAACTGCTCCCTCCCACCCCAC
CCACCATCAAAAAAGCTTTAGAGAGGCTGGACATGGTGGCTCTTGCCTGTGATCCCAGCACTTTGGGA
GGCTAAGGTGGGTGGATCACCTGAGGTCAGGAGTTCGAGACCAGCCTGACCAATATGGTGAAACCCC
ATCTGTACTAAAAATACAAAAATTAGCCAGGTGTGGTGGCACACGCCTGTAGTCCCAGCTACTTGGGA
GGCTGAGACAGGAGAATTACTTGAAAACCTGGGAGGCGGAGGTTGCAGTGAGCCGAGATCACGCCAT
TGTACTCCAGCCTGGGCTACAGAGCGAGACTCCTTCAAAAAAAAAAAAAAAAAAAGATCCGGTTTGG
TGTCTTACAACTGTAATCCCAGCACTTTGGGAGGCCGAGGCCGGTGGATCACGAGGTTAAGAGATCAA
GACCATCCTGACCAACATGGTGAAACCCTGTCTCTACTAAAAATTAGCTGGGCGTGGTGGCAGGCGCC
TGTAGTCCCAGCTCCTCAGGAGGCTGAGGCAGAAGAATCGCTTGAACCCGGGAGGCGGAAGTTGCAG
TGAGCCTAGATCGCGCCCCTGCACTCCAGCCTGGCAACAGAGCAAGACTACGTCTCAAAAAAAAAAT
AAATAAAAACTCTAGAGAAGCAAAAAGAATAACTTTAAAAGTGTTTATGTTCTCAGCAAGCTTTATTT
TGGGGATGTCAGAACTTAACTAACCACTGCTCCTTCTGTGTGTATGTTTTTCCTCCAGCCTACCTTATGT
TCAGTATTTTGGAGGTGTCTCTGCTCTAAGTAAACAACAGTTTCTAACCATCAATGGATTTCCTAATAA
TTATTGGGGCTGGGGAGGAGAAGATGATGACATTTTTAACAGGTAATGGTCATAACTTAGATATCTTT
CTCCTCTGTCAACCTTCACTTCCAGTTTTTTAACCAATGCTTGGTTGTTCCCCAAGGACTGACCCTCAGA
TGGGATGCACCCCTAGTCAGCCCACATTCTTAGGTGTGGCTTCCTACAGGTCCTGCAGGTGCTAAAAG
GGATCTGTAGGAAAATGAGTTTCTGAGATTTTTGTATTGGCCTGGAAAAATGTCAAATGGGAACCAAG
TGACGGGGCAAGTTTACTTTGACTTGCTGCATGCCGTTTTGTACTCAAGGAGTAAACCAATGTCCTTTG
TAAAAATCCCTCCTTTCATTATGGTCCCCTTTCACTGTGAAACAAGTTTCCTTGAGCAGAATCCTAACT
GTCTTCACAGAAGCTTTGTGTTATATTTTTATTTTGGAGTATTTTCACATATACAAAAGAGATACTGTA
GTATAATAAACCTTTGAGGACCTATCCAGCCCCAGCAACCATTATGGCCTGGTCAGTTCTGTCCCATCC
ACATCCTGGGGCTCTTTTTAAGCTGGTAAATCATTATGATGTGGGTTGTCATTTACAGTGGTAAAAAAC
ATCTATCAGTAGCATTTGAAAGAACATTCTGCTCAGTCCTCTGGCTGTAGAGGCTTCAACCCCACCAGC
CACCGATGAGCACCTTCTCCCTCCAGGAGCCAGTCTGAGCTCATTACTGAGTTTAATATCAGAATACA
CCCTGGTGCAGCCTTTCTAAATTGCAGTACCAGTTAACAGAAGGTGTCTGTCAGAGCAACACCCAAGT
CATTCAAGTTACCATTGTGTGCAAACTTAACAGAGACCCACGTCTTCAATATAAGCCTTGAAGGAAAC
TCCAGTTTTAGTATGTAGATGGGGTATCAAGTGTGTGCACATTGAACATCTGCTGCATACAGAGCACT
GTGCCAGGCAGGCCCAGGACACTGAAAACCTGGACATAGGGTCCAGACAGAAGCAAGCCTGCTTCCA
CAGAGGCACTCCTGGGCAGACACTCTGGACTGATATGACAGTGTGCAGGGCCGACAGGATACCACAG
GTCTGAATGGTCAGAACAGCTGGGGAGGGAGGGAGCATCCGCAGGCATCTAGTCCCATGCTAACGCA
GTGGCACTAGAAGGATGGGTGGTGTGTGGAGCAACTTTCTTGAAAGATAAAGGACCTAACACTTTCTA
TGCACCACTTACTGTGTGCCAGGCAAGGCCAGGAATGTTTAAGTGGTCTGGGATCAGCCAGTTCTGCC
TCTTAACTAACTTTGCTGTCCTGCTCTCCAGGCTTTCATTTTGGTCCTCATTCCTTTTCCTTGGACCAAC
ACAGAATCCTCCACCCTGTTCTGGCTGCCTCTAGTCTTGTTCTCAGCCCTCCATTTGTTTTTTTCTGCCTT
TTCCCACATGTTCTGAAGCCCTCCATTCGTATACTACTTTCCAGAGACTTCCCCATGGCTAAAAGCATT
TTGGAAATACTGTATATTAGGCCCCTTTCAGATACTGGCAACCGTTTGTGGGATGCTCTGAGAAGGCCT
CTGTGACTTAGCCTGGCCCTTTTCAGCCCATCACCTGCCACGTCCTACCCCAGACCCTTGTCACCAGTC
CCCAGGAGCTTACGTTGCTCCCTGAGGGCACTAGGCTTGCTCTCACTTCCATGCCTTTGCCTGTGCCAT
CCTGGCTGCCCAAAATGCTATGGCAGATACCTGTTCATCCTCAACTGGGCTCTGCCTAGGCTTGCTCCA
GCAGAGGTTACAAACTCTATGCTTCTTCCTCTGTGTCTCCAACCTCATCTTCCTCTTCTCACCTCCATCC
TGGCCCTAAAGGCCCTATGTTTGAAGCATTCACACTGTATATTCTGTGGGGCACACGGCCCCAGTGTCT
GGCACATGGTAGTCAACACCACAAACCGCAGAACCAGTTGTAAAAGGACATGGAGTCGGAATGTGAG
TTTTAACCAGGGTCATGCTGGGCTGGGTTCTGGCATGATGCTGGGTTGTGGGCTGAGTGAGAACAGCA
AGGGTGATGGTGGATGGAGCAACAGTCTTGCAGCCGGGGCTCTCAGGCCAAGTGTATGGCAGCTCTGT
GATAATGACTTTCCCTTTACTCTTTGCAGATTAGTTTTTAGAGGCATGTCTATATCTCGCCCAAATGCTG
TGGTCGGGAGGTGTCGCATGATCCGCCACTCAAGAGACAAGAAAAATGAACCCAATCCTCAGAGGTG
CATTCTTTGTTTATTCATACTCCTTCCCCCTTTAGGATGAGGTAGGCTGCAGGTCCGAGGCTCTGGGCC
TAGAGGGAAATTGAGGTGGTCAGGTTACAGTGGAGAGGGAGGAGGAAGTACGTGTGATGATTTCTTC
TTAAGATTTTTGTTTTAAGACAATCTCCTTGTGCTCTTTTCCTTGTAGGTTTGACCGAATTGCACACACA
AAGGAGACAATGCTCTCTGATGGTTTGAACTCACTCACCTACCAGGTGCTGGATGTACAGAGATACCC
ATTGTATACCCAAATCACAGTGGACATCGGGACACCGAGCTAGCGTTTTGGTACACGGATAAGAGACC
TGAAATTAGCCAGGGACCTCTGCTGTGTGTCTCTGCCAATCTGCTGGGCTGGTCCCTCTCATTTTTACC
AGTCTGAGTGACAGGTCCCCTTCGCTCATCATTCAGATGGCTTTCCAGATGACCAGGACGAGTGGGAT
ATTTTGCCCCCAACTTGGCTCGGCATGTGAATTCTTAGCTCTGCAAGGTGTTTATGCCTTTGCGGGTTTC
TTGATGTGTTCGCAGTGTCACCCCAGAGTCAGAACTGTACACATCCCAAAATTTGGTGGCCGTGGAAC
ACATTCCCGGTGATAGAATTGCTAAATTGTCGTGAAATAGGTTAGAATTTTTCTTTAAATTATGGTTTT
CTTATTCGTGAAAATTCGGAGAGTGCTGCTAAAATTGGATTGGTGTGATCTTTTTGGTAGTTGTAATTT
AACAGAAAAACACAAAATTTCAACCATTCTTAATGTTACGTCCTCCCCCCACCCCCTTCTTTCAGTGGT
ATGCAACCACTGCAATCACTGTGCATATGTCTTTTCTTAGCAAAAGGATTTTAAAACTTGAGCCCTGGA
CCTTTTGTCCTATGTGTGTGGATTCCAGGGCAACTCTAGCATCAGAGCAAAAGCCTTGGGTTTCTCGCA
TTCAGTGGCCTATCTCCAGATTGTCTGATTTCTGAATGTAAAGTTGTTGTGTTTTTTTTTAAATAGTAGT
TTGTAGTATTTTAAAGAAAGAACAGATCGAGTTCTAATTATGATCTAGCTTGATTTTGTGTTGATCCAA
ATTTGCATAGCTGTTTAATGTTAAGTCATGACAATTTATTTTTCTTGGCATGCTATGTAAACTTGAATTT
CCTATGTATTTTTATTGTGGTGTTTTAAATATGGGGAGGGGTATTGAGCATTTTTTAGGGAGAAAAATA
AATATATGCTGTAGTGGCCACAAATAGGCCTATGATTTAGCTGGCAGGCCAGGTTTTCTCAAGAGCAA
AATCACCCTCTGGCCCCTTGGCAGGTAAGGCCTCCCGGTCAGCATTATCCTGCCAGACCTCGGGGAGG
ATACCTGGGAGACAGAAGCCTCTGCACCTACTGTGCAGAACTCTCCACTTCCCCAACCCTCCCCAGGT
GGGCAGGGCGGAGGGAGCCTCAGCCTCCTTAGACTGACCCCTCAGGCCCCTAGGCTGGGGGGTTGTA
AATAACAGCAGTCAGGTTGTTTACCAGCCCTTTGCACCTCCCCAGGCAGAGGGAGCCTCTGTTCTGGT
GGGGGCCACCTCCCTCAGAGGCTCTGCTAGCCACACTCCGTGGCCCACCCTTTGTTACCAGTTCTTCCT
CCTTCCTCTTTTCCCCTGCCTTTCTCATTCCTTCCTTCGTCTCCCTTTTTGTTCCTTTGCCTCTTGCCTGTC
CCCTAAAACTTGACTGTGGCACTCAGGGTCAAACAGACTATCCATTCCCCAGCATGAATGTGCCTTTTA
ATTAGTGATCTAGAAAGAAGTTCAGCCGAACCCACACCCCAACTCCCTCCCAAGAACTTCGGTGCCTA
AAGCCTCCTGTTCCACCTCAGGTTTTCACAGGTGCTCCCACCCCAGTTGAGGCTCCCACCCACAGGGCT
GTCTGTCACAAACCCACCTCTGTTGGGAGCTATTGAGCCACCTGGGATGAGATGACACAAGGCACTCC
TACCACTGAGCGCCTTTGCCAGGTCCAGCCTGGGCTCAGGTTCCAAGACTCAGCTGCCTAATCCCAGG
GTTGAGCCTTGTGCTCGTGGCGGACCCCAAACCACTGCCCTCCTGGGTACCAGCCCTCAGTGTGGAGG
CTGAGCTGGTGCCTGGCCCCAGTCTTATCTGTGCCTTTACTGCTTTGCGCATCTCAGATGCTAACTTGG
TTCTTTTTCCAGAAGCCTTTGTATTGGTTAAAAATTATTTTCCATTGCAGAAGCAGCTGGACTATGCAA
AAAGTATTTCTCTGTCAGTTCCCCACTCTATACCAAGGATATTATTAAAACTAGAAATGACTGCATTGA
GAGGGAGTTGTGGGAAATAAGAAGAATGAAAGCCTCTCTTTCTGTCCGCAGATCCTGACTTTTCCAAA
GTGCCTTAAAAGAAATCAGACAAATGCCCTGAGTGGTAACTTCTGTGTTATTTTACTCTTAAAACCAA
ACTCTACCTTTTCTTGTTGTTTTTTTTTTTTTTTTTTTTTTTTTTTTGGTTACCTTCTCATTCATGTCAAGTA
TGTGGTTCATTCTTAGAACCAAGGGAAATACTGCTCCCCCCATTTGCTGACGTAGTGCTCTCATGGGCT
CACCTGGGCCCAAGGCACAGCCAGGGCACAGTTAGGCCTGGATGTTTGCCTGGTCCGTGAGATGCCGC
GGGTCCTGTTTCCTTACTGGGGATTTCAGGGCTGGGGGTTCAGGGAGCATTTCCTTTTCCTGGGAGTTA
TGACCGCGAAGTTGTCATGTGCCGTGCCCTTTTCTGTTTCTGTGTATCCTATTGCTGGTGACTCTGTGTG
AACTGGCCTTTGGGAAAGATCAGAGAGGGCAGAGGTGGCACAGGACAGTAAAGGAGATGCTGTGCTG
GCCTTCAGCCTGGACAGGGTCTCTGCTGACTGCCAGGGGCGGGGGCTCTGCATAGCCAGGATGACGGC
TTTCATGTCCCAGAGACCTGTTGTGCTGTGTATTTTGATTTCCTGTGTATGCAAATGTGTGTATTTACCA
TTGTGTAGGGGGCTGTGTCTGATCTTGGTGTTCAAAACAGAACTGTATTTTTGCCTTTAAAATTAAATA
ATATAACGTGAATAAATGACCCTATCTTTGTAACTGCAGGTGGTTTCTGTTTGCCAGGTGTAAGGGTTG
TCATGGCTGTGGGATGGGGTGGGGACAGGGTCATTCCCTGGTCTGTGACCCATACAAATACACATGCC
TCCCTGGAATCAGACATTTCCCCATCTGAACTTCATTCTCTTATCTGTAAAATGGGAATAATAACACAT
AGGGACTTTTTTGAGGCTTAAAAGTGACGATATATGTAAAACAATGACTAATGCCTCACAAGTACTCA
CTACATAGTAGCTAGTGCCATTTCAAAGTAGAATTTTTTTCCCCTAGCAGTTCTTGGGCCACATTCTGC
TATTTTCAACAGATACCAGGATCATTCAGATGTAGATCTCAGGGCCATTTGCACCAGGTGCTCACAGT
GTAACTTGAAGGGAATTATCCAAAATGAGGTTTCTTGTCAGTCTCAGGAAATGTAACCATAAGCTCTA
AAAGGTCTTAGTTTTTACCCAGGTGCCTCCTCCTTGGTGGCCCTGGGTCAGGCTGGTTGGATTGAATTG
GCACTCCTGAAGAAGGGCTGCAGGAAACCAGTGAGCAGGAGAGCCACCCTTGGCAGGGAGCTGCAGG
CCCTGCCTGCATGTCACTGCTGGAGGGATCCCTGGTGACCTCAGGCCTGTGCAAAGGTGGCCTGGGGT
TCAGATCTGGCCTTCAAACAGGACAACTCTGGTCCTTTGGACAAAATGCTGCCTTAGAGGGTCTGACA
AAATTAAAAACAAACAAAAAAAAACCTGTTTCTTTCCTTCTCACACACCACCACTCACAACACTTCAG
TTCTGCCCCTAGATATGTAGGGATTTCTCCCCACCAACAAGCAGTTTTCTAGTGGACACTAGCTGGGTG
TCCTACAGTTTAACTCAATTCTGACACTGTCTGCCTGGAGATAGCAACGGATCCCACAGGTTGAGGGC
TCAGTCTCACAAGACTGCCTCCACTGCAGATGCCAGTCACAAGTAGTTGGTTGTGACCTATGCTTTACA
AAAATGTTTTTTGGATACAGGGCCTTGCTGTGTCACCCAGGCTGGCCTGAAACTCCTGGGCTCACACA
ATCCTCCCGCCACAACTTAGAAGTAGCTGAGCTGCAGGTTTATACCACTCACCCAGCTATAGTTGTGA
CCTATACTTCTGACCAACCAGCTATAAATTGGGGTTTCTATGAGCCTCTTCTTGGGTTTAATTTGCTAG
GTCAGCTTACAGAACTCAGTGTAACACTTAACATTTACTGGTCTTATTATAAGTGATATTAGAAAGGAT
ACTGATGAAGAACCGGATGGAGAGATGCATAGGGCAAGGCATGGGGGAGGGGGAGAGAAGCTTCCA
TGCCCTCTCCAGGGGCTCCACCCTCCAGACACCTCCACGTGTTCAGCTATCTGGAAGCTCATCTGACCC
TGTCCTTCTGGTTTTTATGGAAGCTTCATCACATAGGCCTGATAGACTACATCATCGGCCATTGCCAGT
CAGCTCAACCTTCAGCCCTTTTCCCCTTCCTGAAGGATGGGAGTGGGACTGAAAGTGCCAACCTTCTCA
TCATGGCTTGGTCTTTCTGGTGACCAGTCCCCATCCAGGAGTTCACTGAGAATCATTTCATTAAAACAA
AAGACGTTCCTATCACCCGGGAAATTCCAAGGGATTAGAAGCTCTGTCAGGAACCAGGGTCAAGCAC
CAAATATTAGAACAAAAGATTCTCCTAGCATAAATATTAGAACAAAAGATTCTCCTAGCATAAATATT
AGAACAAAAAATTCTCCTATTGCTCAGGAAATTATAAGAGTTTTAGGGGCTCTGTACCAGGAACCCAG
CGCAGAGGCCAAATATATATATTTTATTATCTCACAGTGCCACACAGGACTTTGCAAGCTGTCAGGTCT
GAGTGAGATGGAGCACACCAGTGAAAGGTTAAGTTCACCCTTTCACTGATGTGCTCCACTTCACTGAG
ACACATATCCACACAGACACACAGAGACACACACATCCACCCAGACGCACGCA

[1572] Following Table 1 provides oligonucleoside mRNA target sequences of HCHI, ZPI and B4GALT1, together with the corresponding positions in transcripts NM_000185.4, NM_016186.3 and NM_001497.4, respectively.

TABLE 1

| | Oligonucleoside mRNA | Starting position on | Reference |
|---|---|---|---|
| SEQ ID NO | target sequence 5′→3′ | reference sequence | sequence ID |
| SEQ ID NO: 3 | GGUGAAUAAAUUCCCAGUGGAAA | 946 | NM_000185.4 |
| SEQ ID NO: 4 | AACUGCAUCUACUUCAAAGGAUC | 920 | NM_000185.4 |
| SEQ ID NO: 5 | CAACUGCAUCUACUUCAAAGGAU | 919 | NM_000185.4 |
| SEQ ID NO: 6 | AAGGGAGAGACCCAUGAACAAGU | 557 | NM_000185.4 |
| SEQ ID NO: 7 | UGGGUGAAUAAAUUCCCAGUGGA | 944 | NM_000185.4 |
| SEQ ID NO: 8 | CUUCAGGAGGAAUUUUGGGUACA | 676 | NM_000185.4 |
| SEQ ID NO: 9 | CAGCUGCCUGCUCUUCAUGGGAA | 1501 | NM_000185.4 |
| SEQ ID NO: 10 | CUCACCAAGGGCCUCAUAAAAGA | 854 | NM_000185.4 |
| SEQ ID NO: 11 | GACCUUUAUAUCCAGAAGCAGUU | 716 | NM_000185.4 |
| SEQ ID NO: 12 | CUCAACUGCAUCUACUUCAAAGG | 917 | NM_000185.4 |
| SEQ ID NO: 13 | AAGAGCCGGAUCCAGCGUCUUAA | 407 | NM_000185.4 |
| SEQ ID NO: 14 | GGAUCCAGCGUCUUAACAUCCUC | 414 | NM_000185.4 |
| SEQ ID NO: 15 | GGCAAAAAAGCAUGACAAACAGA | 1191 | NM_000185.4 |
| SEQ ID NO: 16 | UUCAGGAGGAAUUUUGGGUACAC | 677 | NM_000185.4 |
| SEQ ID NO: 17 | CACAACCACAACUUCCGGCUGAA | 974 | NM_000185.4 |
| SEQ ID NO: 18 | AUGGCAAAAAAGCAUGACAAACA | 1189 | NM_000185.4 |
| SEQ ID NO: 19 | GUGAAUAAAUUCCCAGUGGAAAU | 947 | NM_000185.4 |
| SEQ ID NO: 20 | GGGGGCAUCAGCAUGCUAAUUGU | 1100 | NM_000185.4 |
| SEQ ID NO: 21 | CAAAAAAGCAUGACAAACAGAAC | 1193 | NM_000185.4 |
| SEQ ID NO: 22 | GAGAGUAUUACUUUGCUGAGGCC | 771 | NM_000185.4 |
| SEQ ID NO: 23 | UUUGCCUUCAUCCACAAGGAUUU | 991 | NM_016186.3 |
| SEQ ID NO: 24 | GCUGCGAAAGAUCUCCAUGAGGC | 756 | NM_016186.3 |
| SEQ ID NO: 25 | AUGCUGGUGGUCCUCAUGGAGAA | 1390 | NM_016186.3 |
| SEQ ID NO: 26 | CUGCGAAAGAUCUCCAUGAGGCA | 757 | NM_016186.3 |
| SEQ ID NO: 27 | AAGUAUGAGAUGCAUGAGCUGCU | 1531 | NM_016186.3 |
| SEQ ID NO: 28 | CUGUUUGAUGAGAUUAAUCCUGA | 1156 | NM_016186.3 |
| SEQ ID NO: 29 | GAUGAGAUUAAUCCUGAAACCAA | 1162 | NM_016186.3 |
| SEQ ID NO: 30 | UUUGAUGAGAUUAAUCCUGAAAC | 1159 | NM_016186.3 |
| SEQ ID NO: 31 | UGAUGAGAUUAAUCCUGAAACCA | 1161 | NM_016186.3 |
| SEQ ID NO: 32 | UUGAUGAGAUUAAUCCUGAAACC | 1160 | NM_016186.3 |
| SEQ ID NO: 33 | AACUGUUUGAUGAGAUUAAUCCU | 1154 | NM_016186.3 |
| SEQ ID NO: 34 | AGUUUUGCCUUCAUCCACAAGGA | 988 | NM_016186.3 |
| SEQ ID NO: 35 | UGCGAAAGAUCUCCAUGAGGCAC | 758 | NM_016186.3 |
| SEQ ID NO: 36 | CAUGCUGGUGGUCCUCAUGGAGA | 1389 | NM_016186.3 |
| SEQ ID NO: 37 | UGCCUUCAUCCACAAGGAUUUUG | 993 | NM_016186.3 |
| SEQ ID NO: 38 | GCGAAAGAUCUCCAUGAGGCACG | 759 | NM_016186.3 |
| SEQ ID NO: 39 | CCUUCAUCCACAAGGAUUUUGAU | 995 | NM_016186.3 |
| SEQ ID NO: 40 | UGUUUGAUGAGAUUAAUCCUGAA | 1157 | NM_016186.3 |
| SEQ ID NO: 41 | UUUUGCCUUCAUCCACAAGGAUU | 990 | NM_016186.3 |
| SEQ ID NO: 42 | AAGAUCUCCAUGAGGCACGAUGG | 763 | NM_016186.3 |
| SEQ ID NO: 443 | CCUACCAAGGAAAUGCCACCAUG | 1370 | NM_016186.3 |
| SEQ ID NO: 444 | CGAAAGAUCUCCAUGAGGCACGA | 760 | NM_016186.3 |
| SEQ ID NO: 445 | CAAAAAAGCAUGACAAACAGAAC | 1193 | NM_000185.4 |
| SEQ ID NO: 446 | AAAAGCAUGACAAACAGAACUCG | 1196 | NM_000185.4 |
| SEQ ID NO: 447 | GUAAACUUGAAUUUCCUAUGUAU | 2209 | NM_001497.4 |
| SEQ ID NO: 448 | AACUUGAAUUUCCUAUGUAUUUU | 2212 | NM_001497.4 |

[1573] Table 2 provides the unmodified first (antisense) and corresponding unmodified second (sense) strand sequences for siRNA oligonucleosides (targeting HCII, ZPI and B4GALT1) according to the present invention, together with the corresponding positions in the overall gene sequence of SEQ ID NOs: 1, 2 and 485 as follows.

TABLE 2

| | First (Antisense) | | Second (Sense) | Corres- | |
|---|---|---|---|---|---|
| | Strand | | Strand | ponding | |
| | Base Sequence | | Base Sequence | positions | |
| | 5′→3′ (Shown | | 5′→3′ (Shown | on | Reference |
| SEQ ID | as an Unmodified | SEQ ID | as an Unmodified | reference | sequence |
| NO (AS) | Nucleoside Sequence) | NO (SS) | Nucleoside Sequence) | sequence | ID |
| SEQ ID | UUUCCACUGGGAAUU | SEQ ID | UGAAUAAAUUCCC | 946-967 | NM_000185.4 |
| NO: 43 | UAUUCACC | NO: 83 | AGUGGAAA | | |
| SEQ ID | GAUCCUUUGAAGUAG | SEQ ID | CUGCAUCUACUUC | 920-941 | NM_000185.4 |
| NO: 44 | AUGCAGUU | NO: 84 | AAAGGAUC | | |
| SEQ ID | AUCCUUUGAAGUAGA | SEQ ID | ACUGCAUCUACUU | 919-940 | NM_000185.4 |
| NO: 45 | UGCAGUUG | NO: 85 | CAAAGGAU | | |
| SEQ ID | ACUUGUUCAUGGGUC | SEQ ID | GGGAGAGACCCAU | 557-578 | NM_000185.4 |
| NO: 46 | UCUCCCUU | NO: 86 | GAACAAGU | | |
| SEQ ID | UCCACUGGGAAUUUA | SEQ ID | GGUGAAUAAAUUC | 944-965 | NM_000185.4 |
| NO: 47 | UUCACCCA | NO: 87 | CCAGUGGA | | |
| SEQ ID | UGUACCCAAAAUUCC | SEQ ID | UCAGGAGGAAUUU | 676-697 | NM_000185.4 |
| NO: 48 | UCCUGAAG | NO: 88 | UGGGUACA | | |
| SEQ ID | UUCCCAUGAAGAGCA | SEQ ID | GCUGCCUGCUCUU | 1501-1522 | NM_000185.4 |
| NO: 49 | GGCAGCUG | NO: 89 | CAUGGGAA | | |
| SEQ ID | UCUUUUAUGAGGCCC | SEQ ID | CACCAAGGGCCUC | 854-875 | NM_000185.4 |
| NO: 50 | UUGGUGAG | NO: 90 | AUAAAAGA | | |
| SEQ ID | AACUGCUUCUGGAUA | SEQ ID | CCUUUAUAUCCAG | 716-737 | NM_000185.4 |
| NO: 51 | UAAAGGUC | NO: 91 | AAGCAGUU | | |
| SEQ ID | CCUUUGAAGUAGAUG | SEQ ID | CAACUGCAUCUAC | 917-938 | NM_000185.4 |
| NO: 52 | CAGUUGAG | NO: 92 | UUCAAAGG | | |
| SEQ ID | UUAAGACGCUGGAUC | SEQ ID | GAGCCGGAUCCAG | 407-428 | NM_000185.4 |
| NO: 53 | CGGCUCUU | NO: 93 | CGUCUUAA | | |
| SEQ ID | GAGGAUGUUAAGACG | SEQ ID | AUCCAGCGUCUUA | 414-435 | NM_000185.4 |
| NO: 54 | CUGGAUCC | NO: 94 | ACAUCCUC | | |
| SEQ ID | UCUGUUUGUCAUGCU | SEQ ID | CAAAAAAGCAUGA | 1191-1212 | NM_000185.4 |
| NO: 55 | UUUUUGCC | NO: 95 | CAAACAGA | | |
| SEQ ID | GUGUACCCAAAAUUC | SEQ ID | CAGGAGGAAUUUU | 677-698 | NM_000185.4 |
| NO: 56 | CUCCUGAA | NO: 96 | GGGUACAC | | |
| SEQ ID | UUCAGCCGGAAGUUG | SEQ ID | CAACCACAACUUC | 974-995 | NM_000185.4 |
| NO: 57 | UGGUUGUG | NO: 97 | CGGCUGAA | | |
| SEQ ID | UGUUUGUCAUGCUUU | SEQ ID | GGCAAAAAAGCAU | 1189-1210 | NM_000185.4 |
| NO: 58 | UUUGCCAU | NO: 98 | GACAAACA | | |
| SEQ ID | AUUUCCACUGGGAAU | SEQ ID | GAAUAAAUUCCCA | 947-968 | NM_000185.4 |
| NO: 59 | UUAUUCAC | NO: 99 | GUGGAAAU | | |
| SEQ ID | ACAAUUAGCAUGCUG | SEQ ID | GGGCAUCAGCAUG | 1100-1121 | NM_000185.4 |
| NO: 60 | AUGCCCCC | NO: 100 | CUAAUUGU | | |
| SEQ ID | GUUCUGUUUGUCAUG | SEQ ID | AAAAAGCAUGACA | 1193-1214 | NM_000185.4 |
| NO: 61 | CUUUUUUG | NO: 101 | AACAGAAC | | |
| SEQ ID | GGCCUCAGCAAAGUA | SEQ ID | GAGUAUUACUUUG | 771-792 | NM_000185.4 |
| NO: 62 | AUACUCUC | NO: 102 | CUGAGGCC | | |
| SEQ ID | AAAUCCUUGUGGAUG | SEQ ID | UGCCUUCAUCCAC | 991-1012 | NM_016186.3 |
| NO: 63 | AAGGCAAA | NO: 103 | AAGGAUUU | | |
| SEQ ID | GCCUCAUGGAGAUCU | SEQ ID | UGCGAAAGAUCUC | 756-777 | NM_016186.3 |
| NO: 64 | UUCGCAGC | NO: 104 | CAUGAGGC | | |
| SEQ ID | UUCUCCAUGAGGACC | SEQ ID | GCUGGUGGUCCUC | 1390-1411 | NM_016186.3 |
| NO: 65 | ACCAGCAU | NO: 105 | AUGGAGAA | | |
| SEQ ID | UGCCUCAUGGAGAUC | SEQ ID | GCGAAAGAUCUCC | 757-778 | NM_016186.3 |
| NO: 66 | UUUCGCAG | NO: 106 | AUGAGGCA | | |
| SEQ ID | AGCAGCUCAUGCAUC | SEQ ID | GUAUGAGAUGCAU | 1531-1552 | NM_016186.3 |
| NO: 67 | UCAUACUU | NO: 107 | GAGCUGCU | | |
| SEQ ID | UCAGGAUUAAUCUCA | SEQ ID | GUUUGAUGAGAUU | 1156-1177 | NM_016186.3 |
| NO: 68 | UCAAACAG | NO: 108 | AAUCCUGA | | |
| SEQ ID | UUGGUUUCAGGAUUA | SEQ ID | UGAGAUUAAUCCU | 1162-1183 | NM_016186.3 |
| NO: 69 | AUCUCAUC | NO: 109 | GAAACCAA | | |
| SEQ ID | GUUUCAGGAUUAAUC | SEQ ID | UGAUGAGAUUAAU | 1159-1180 | NM_016186.3 |
| NO: 70 | UCAUCAAA | NO: 110 | CCUGAAAC | | |
| SEQ ID | UGGUUUCAGGAUUAA | SEQ ID | AUGAGAUUAAUCC | 1161-1182 | NM_016186.3 |
| NO: 71 | UCUCAUCA | NO: 111 | UGAAACCA | | |
| SEQ ID | GGUUUCAGGAUUAAU | SEQ ID | GAUGAGAUUAAUC | 1160-1181 | NM_016186.3 |
| NO: 72 | CUCAUCAA | NO: 112 | CUGAAACC | | |
| SEQ ID | AGGAUUAAUCUCAUC | SEQ ID | CUGUUUGAUGAGA | 1154-1175 | NM_016186.3 |
| NO: 73 | AAACAGUU | NO: 113 | UUAAUCCU | | |
| SEQ ID | UCCUUGUGGAUGAAG | SEQ ID | UUUUGCCUUCAUC | 988-1009 | NM_016186.3 |
| NO: 74 | GCAAAACU | NO: 114 | CACAAGGA | | |
| SEQ ID | GUGCCUCAUGGAGAU | SEQ ID | CGAAAGAUCUCCA | 758-779 | NM_016186.3 |
| NO: 75 | CUUUCGCA | NO: 115 | UGAGGCAC | | |
| SEQ ID | UCUCCAUGAGGACCA | SEQ ID | UGCUGGUGGUCCU | 1389-1410 | NM_016186.3 |
| NO: 76 | CCAGCAUG | NO: 116 | CAUGGAGA | | |
| SEQ ID | CAAAAUCCUUGUGGA | SEQ ID | CCUUCAUCCACAA | 993-1014 | NM_016186.3 |
| NO: 77 | UGAAGGCA | NO: 117 | GGAUUUUG | | |
| SEQ ID | CGUGCCUCAUGGAGA | SEQ ID | GAAAGAUCUCCAU | 759-780 | NM_016186.3 |
| NO: 78 | UCUUUCGC | NO: 118 | GAGGCACG | | |
| SEQ ID | AUCAAAAUCCUUGUG | SEQ ID | UUCAUCCACAAGG | 995-1016 | NM_016186.3 |
| NO: 79 | GAUGAAGG | NO: 119 | AUUUUGAU | | |
| SEQ ID | UUCAGGAUUAAUCUC | SEQ ID | UUUGAUGAGAUUA | 1157-1178 | NM_016186.3 |
| NO: 80 | AUCAAACA | NO: 120 | AUCCUGAA | | |
| SEQ ID | AAUCCUUGUGGAUGA | SEQ ID | UUGCCUUCAUCCA | 990-1011 | NM_016186.3 |
| NO: 81 | AGGCAAAA | NO: 121 | CAAGGAUU | | |
| SEQ ID | CCAUCGUGCCUCAUG | SEQ ID | GAUCUCCAUGAGG | 763-784 | NM_016186.3 |
| NO: 82 | GAGAUCUU | NO: 122 | CACGAUGG | | |
| SEQ ID | CAUGGUGGCAUUUCC | SEQ ID | UACCAAGGAAAUG | 1370-1391 | NM_016186.3 |
| NO: 449 | UUGGUAGG | NO: 455 | CCACCAUG | | |
| SEQ ID | UCGUGCCUCAUGGAG | SEQ ID | AAAGAUCUCCAUG | 760-781 | NM_016186.3 |
| NO: 450 | AUCUUUCG | NO: 456 | AGGCACGA | | |
| SEQ ID | GUUCUGUUUGUCAUG | SEQ ID | AAAAAGCAUGACA | 1193-1214 | NM_000185.4 |
| NO: 451 | CUUUUUUG | NO: 457 | AACAGAAC | | |
| SEQ ID | CGAGUUCUGUUUGUC | SEQ ID | AAGCAUGACAAAC | 1196-1217 | NM_000185.4 |
| NO: 452 | AUGCUUUU | NO: 458 | AGAACUCG | | |
| SEQ ID | AUACAUAGGAAAUUC | SEQ ID | AAACUUGAAUUUC | 2209-2230 | NM_001497.4 |
| NO: 453 | AAGUUUAC | NO: 459 | CUAUGUAU | | |
| SEQ ID | AAAAUACAUAGGAAA | SEQ ID | CUUGAAUUUCCUA | 2212-2233 | NM_001497.4 |
| NO: 454 | UUCAAGUU | NO: 460 | UGUAUUUU | | |

[1574] Table 3 provides the modified first (antisense) sequences, together with the corresponding unmodified first (antisense) sequences for siRNA oligonucleosides (targeting HCII, ZPI and B4GALT1) according to the present invention as follows.

TABLE 3

| | | | Underlying Base | |
|---|---|---|---|---|
| | | | Sequence | |
| Antisense | | SEQ ID | 5′→3′ (Shown | SEQ ID |
| strand | Modified First (Antisense) | NO | as an Unmodified | NO |
| ID | Strand 5′→3′ | (AS-mod) | Nucleoside Sequence) | (AS-unmod) |
| ETXS472 | UmsUfsUmCfCmAfCmUfGfGmGmAmA | SEQ ID | UUUCCACUGGGAAUUU | SEQ ID |
| | mUfUmUfAmUmUmCmAmsCmsCm | NO: 123 | AUUCACC | NO: 43 |
| ETXS474 | GmsAfsUmCfCmUfUmUfGfAmAmGmU | SEQ ID | GAUCCUUUGAAGUAGA | SEQ ID |
| | mAfGmAfUmGmCmAmGmsUmsUm | NO: 124 | UGCAGUU | NO: 44 |
| ETXS476 | AmsUfsCmCfUmUfUmGfAfAmGmUmA | SEQ ID | AUCCUUUGAAGUAGAU | SEQ ID |
| | mGfAmUfGmCmAmGmUmsUmsGm | NO: 125 | GCAGUUG | NO: 45 |
| ETXS478 | AmsCfsUmUfGmUfUmCfAfUmGmGmG | SEQ ID | ACUUGUUCAUGGGUCU | SEQ ID |
| | mUfCmUfCmUmCmCmCmsUmsUm | NO: 126 | CUCCCUU | NO: 46 |
| ETXS480 | UmsCfsCmAfCmUfGmGfGfAmAmUmU | SEQ ID | UCCACUGGGAAUUUAU | SEQ ID |
| | mUfAmUfUmCmAmCmCmsCmsAm | NO: 127 | UCACCCA | NO: 47 |
| ETXS482 | UmsGfsUmAfCmCfCmAfAfAmAmUmU | SEQ ID | UGUACCCAAAAUUCCU | SEQ ID |
| | mCfCmUfCmCmUmGmAmsAmsGm | NO: 128 | CCUGAAG | NO: 48 |
| ETXS484 | UmsUfsCmCfCmAfUmGfAfAmGmAmG | SEQ ID | UUCCCAUGAAGAGCAG | SEQ ID |
| | mCfAmGfGmCmAmGmCmsUmsGm | NO: 129 | GCAGCUG | NO: 49 |
| ETXS486 | UmsCfsUmUfUmUfAmUfGfAmGmGmC | SEQ ID | UCUUUUAUGAGGCCCU | SEQ ID |
| | mCfCmUfUmGmGmUmGmsAmsGm | NO: 130 | UGGUGAG | NO: 50 |
| ETXS488 | AmsAfsCmUfGmCfUmUfCfUmGmGmA | SEQ ID | AACUGCUUCUGGAUAU | SEQ ID |
| | mUfAmUfAmAmAmGmGmsUmsCm | NO: 131 | AAAGGUC | NO: 51 |
| ETXS490 | CmsCfsUmUfUmGfAmAfGfUmAmGmA | SEQ ID | CCUUUGAAGUAGAUGC | SEQ ID |
| | mUfGmCfAmGmUmUmGmsAmsGm | NO: 132 | AGUUGAG | NO: 52 |
| ETXS492 | UmsUfsAmAfGmAfCmGfCfUmGmGmA | SEQ ID | UUAAGACGCUGGAUCC | SEQ ID |
| | mUfCmCfGmGmCmUmCmsUmsUm | NO: 133 | GGCUCUU | NO: 53 |
| ETXS494 | GmsAfsGmGfAmUfGmUfUfAmAmGmA | SEQ ID | GAGGAUGUUAAGACGC | SEQ ID |
| | mCfGmCfUmGmGmAmUmsCmsCm | NO: 134 | UGGAUCC | NO: 54 |
| ETXS496 | UmsCfsUmGfUmUfUmGfUfCmAmUmG | SEQ ID | UCUGUUUGUCAUGCUU | SEQ ID |
| | mCfUmUfUmUmUmUmGmsCmsCm | NO: 135 | UUUUGCC | NO: 55 |
| ETXS498 | GmsUfsGmUfAmCfCmCfAfAmAmAmU | SEQ ID | GUGUACCCAAAAUUCC | SEQ ID |
| | mUfCmCfUmCmCmUmGmsAmsAm | NO: 136 | UCCUGAA | NO: 56 |
| ETXS500 | UmsUfsCmAfGmCfCmGfGfAmAmGmU | SEQ ID | UUCAGCCGGAAGUUGU | SEQ ID |
| | mUfGmUfGmGmUmUmGmsUmsGm | NO: 137 | GGUUGUG | NO: 57 |
| ETXS502 | UmsGfsUmUfUmGfUmCfAfUmGmCmU | SEQ ID | UGUUUGUCAUGCUUUU | SEQ ID |
| | mUfUmUfUmUmGmCmCmsAmsUm | NO: 138 | UUGCCAU | NO: 58 |
| ETXS504 | AmsUfsUmUfCmCfAmCfUfGmGmGmA | SEQ ID | AUUUCCACUGGGAAUU | SEQ ID |
| | mAfUmUfUmAmUmUmCmsAmsCm | NO: 139 | UAUUCAC | NO: 59 |
| ETXS506 | AmsCfsAmAfUmUfAmGfCfAmUmGmC | SEQ ID | ACAAUUAGCAUGCUGA | SEQ ID |
| | mUfGmAfUmGmCmCmCmsCmsCm | NO: 140 | UGCCCCC | NO: 60 |
| ETXS508 | GmsUfsUmCfUmGfUmUfUfGmUmCmA | SEQ ID | GUUCUGUUUGUCAUGC | SEQ ID |
| | mUfGmCfUmUmUmUmUmsUmsGm | NO: 141 | UUUUUUG | NO: 61 |
| ETXS510 | GmsGfsCmCfUmCfAmGfCfAmAmAmG | SEQ ID | GGCCUCAGCAAAGUAA | SEQ ID |
| | mUfAmAfUmAmCmUmCmsUmsCm | NO: 142 | UACUCUC | NO: 62 |
| ETXS512 | UmsUfsUmCfCmAfCmUfGfGmGmAmA | SEQ ID | UUUCCACUGGGAAUUU | SEQ ID |
| | mUfUmUfAmUmUmCmAmsCmsCm | NO: 143 | AUUCACC | NO: 43 |
| ETXS514 | GmsAfsUmCfCmUfUmUfGfAmAmGmU | SEQ ID | GAUCCUUUGAAGUAGA | SEQ ID |
| | mAfGmAfUmGmCmAmGmsUmsUm | NO: 144 | UGCAGUU | NO: 44 |
| ETXS516 | AmsUfsCmCfUmUfUmGfAfAmGmUmA | SEQ ID | AUCCUUUGAAGUAGAU | SEQ ID |
| | mGfAmUfGmCmAmGmUmsUmsGm | NO: 145 | GCAGUUG | NO: 45 |
| ETXS518 | AmsCfsUmUfGmUfUmCfAfUmGmGmG | SEQ ID | ACUUGUUCAUGGGUCU | SEQ ID |
| | mUfCmUfCmUmCmCmCmsUmsUm | NO: 146 | CUCCCUU | NO: 46 |
| ETXS520 | UmsCfsCmAfCmUfGmGfGfAmAmUmU | SEQ ID | UCCACUGGGAAUUUAU | SEQ ID |
| | mUfAmUfUmCmAmCmCmsCmsAm | NO: 147 | UCACCCA | NO: 47 |
| ETXS522 | UmsGfsUmAfCmCfCmAfAfAmAmUmU | SEQ ID | UGUACCCAAAAUUCCU | SEQ ID |
| | mCfCmUfCmCmUmGmAmsAmsGm | NO: 148 | CCUGAAG | NO: 48 |
| ETXS524 | UmsUfsCmCfCmAfUmGfAfAmGmAmG | SEQ ID | UUCCCAUGAAGAGCAG | SEQ ID |
| | mCfAmGfGmCmAmGmCmsUmsGm | NO: 149 | GCAGCUG | NO: 49 |
| ETXS526 | UmsCfsUmUfUmUfAmUfGfAmGmGmC | SEQ ID | UCUUUUAUGAGGCCCU | SEQ ID |
| | mCfCmUfUmGmGmUmGmsAmsGm | NO: 150 | UGGUGAG | NO: 50 |
| ETXS528 | AmsAfsCmUfGmCfUmUfCfUmGmGmA | SEQ ID | AACUGCUUCUGGAUAU | SEQ ID |
| | mUfAmUfAmAmAmGmGmsUmsCm | NO: 151 | AAAGGUC | NO: 51 |
| ETXS530 | CmsCfsUmUfUmGfAmAfGfUmAmGmA | SEQ ID | CCUUUGAAGUAGAUGC | SEQ ID |
| | mUfGmCfAmGmUmUmGmsAmsGm | NO: 152 | AGUUGAG | NO: 52 |
| ETXS532 | UmsUfsAmAfGmAfCmGfCfUmGmGmA | SEQ ID | UUAAGACGCUGGAUCC | SEQ ID |
| | mUfCmCfGmGmCmUmCmsUmsUm | NO: 153 | GGCUCUU | NO: 53 |
| ETXS534 | GmsAfsGmGfAmUfGmUfUfAmAmGmA | SEQ ID | GAGGAUGUUAAGACGC | SEQ ID |
| | mCfGmCfUmGmGmAmUmsCmsCm | NO: 154 | UGGAUCC | NO: 54 |
| ETXS536 | UmsCfsUmGfUmUfUmGfUfCmAmUmG | SEQ ID | UCUGUUUGUCAUGCUU | SEQ ID |
| | mCfUmUfUmUmUmUmGmsCmsCm | NO: 155 | UUUUGCC | NO: 55 |
| ETXS538 | GmsUfsGmUfAmCfCmCfAfAmAmAmU | SEQ ID | GUGUACCCAAAAUUCC | SEQ ID |
| | mUfCmCfUmCmCmUmGmsAmsAm | NO: 156 | UCCUGAA | NO: 56 |
| ETXS540 | UmsUfsCmAfGmCfCmGfGfAmAmGmU | SEQ ID | UUCAGCCGGAAGUUGU | SEQ ID |
| | mUfGmUfGmGmUmUmGmsUmsGm | NO: 157 | GGUUGUG | NO: 57 |
| ETXS542 | UmsGfsUmUfUmGfUmCfAfUmGmCmU | SEQ ID | UGUUUGUCAUGCUUUU | SEQ ID |
| | mUfUmUfUmUmGmCmCmsAmsUm | NO: 158 | UUGCCAU | NO: 58 |
| ETXS544 | AmsUfsUmUfCmCfAmCfUfGmGmGmA | SEQ ID | AUUUCCACUGGGAAUU | SEQ ID |
| | mAfUmUfUmAmUmUmCmsAmsCm | NO: 159 | UAUUCAC | NO: 59 |
| ETXS546 | AmsCfsAmAfUmUfAmGfCfAmUmGmC | SEQ ID | ACAAUUAGCAUGCUGA | SEQ ID |
| | mUfGmAfUmGmCmCmCmsCmsCm | NO: 160 | UGCCCCC | NO: 60 |
| ETXS548 | GmsUfsUmCfUmGfUmUfUfGmUmCmA | SEQ ID | GUUCUGUUUGUCAUGC | SEQ ID |
| | mUfGmCfUmUmUmUmUmsUmsGm | NO: 161 | UUUUUUG | NO: 61 |
| ETXS550 | GmsGfsCmCfUmCfAmGfCfAmAmAmG | SEQ ID | GGCCUCAGCAAAGUAA | SEQ ID |
| | mUfAmAfUmAmCmUmCmsUmsCm | NO: 162 | UACUCUC | NO: 62 |
| ETXS552 | UmsUfsUmCfCmAfCmUfGfGmGmAmA | SEQ ID | UUUCCACUGGGAAUUU | SEQ ID |
| | mUfUmUfAmUmUmCmAmsCmsCm | NO: 163 | AUUCACC | NO: 43 |
| ETXS554 | GmsAfsUmCfCmUfUmUfGfAmAmGmU | SEQ ID | GAUCCUUUGAAGUAGA | SEQ ID |
| | mAfGmAfUmGmCmAmGmsUmsUm | NO: 164 | UGCAGUU | NO: 44 |
| ETXS556 | AmsUfsCmCfUmUfUmGfAfAmGmUmA | SEQ ID | AUCCUUUGAAGUAGAU | SEQ ID |
| | mGfAmUfGmCmAmGmUmsUmsGm | NO: 165 | GCAGUUG | NO: 45 |
| ETXS558 | AmsCfsUmUfGmUfUmCfAfUmGmGmG | SEQ ID | ACUUGUUCAUGGGUCU | SEQ ID |
| | mUfCmUfCmUmCmCmCmsUmsUm | NO: 166 | CUCCCUU | NO: 46 |
| ETXS560 | UmsCfsCmAfCmUfGmGfGfAmAmUmU | SEQ ID | UCCACUGGGAAUUUAU | SEQ ID |
| | mUfAmUfUmCmAmCmCmsCmsAm | NO: 167 | UCACCCA | NO: 47 |
| ETXS562 | UmsGfsUmAfCmCfCmAfAfAmAmUmU | SEQ ID | UGUACCCAAAAUUCCU | SEQ ID |
| | mCfCmUfCmCmUmGmAmsAmsGm | NO: 168 | CCUGAAG | NO: 48 |
| ETXS564 | UmsUfsCmCfCmAfUmGfAfAmGmAmG | SEQ ID | UUCCCAUGAAGAGCAG | SEQ ID |
| | mCfAmGfGmCmAmGmCmsUmsGm | NO: 169 | GCAGCUG | NO: 49 |
| ETXS566 | UmsCfsUmUfUmUfAmUfGfAmGmGmC | SEQ ID | UCUUUUAUGAGGCCCU | SEQ ID |
| | mCfCmUfUmGmGmUmGmsAmsGm | NO: 170 | UGGUGAG | NO: 50 |
| ETXS568 | AmsAfsCmUfGmCfUmUfCfUmGmGmA | SEQ ID | AACUGCUUCUGGAUAU | SEQ ID |
| | mUfAmUfAmAmAmGmGmsUmsCm | NO: 171 | AAAGGUC | NO: 51 |
| ETXS570 | CmsCfsUmUfUmGfAmAfGfUmAmGmA | SEQ ID | CCUUUGAAGUAGAUGC | SEQ ID |
| | mUfGmCfAmGmUmUmGmsAmsGm | NO: 172 | AGUUGAG | NO: 52 |
| ETXS572 | UmsUfsAmAfGmAfCmGfCfUmGmGmA | SEQ ID | UUAAGACGCUGGAUCC | SEQ ID |
| | mUfCmCfGmGmCmUmCmsUmsUm | NO: 173 | GGCUCUU | NO: 53 |
| ETXS574 | GmsAfsGmGfAmUfGmUfUfAmAmGmA | SEQ ID | GAGGAUGUUAAGACGC | SEQ ID |
| | mCfGmCfUmGmGmAmUmsCmsCm | NO: 174 | UGGAUCC | NO: 54 |
| ETXS576 | UmsCfsUmGfUmUfUmGfUfCmAmUmG | SEQ ID | UCUGUUUGUCAUGCUU | SEQ ID |
| | mCfUmUfUmUmUmUmGmsCmsCm | NO: 175 | UUUUGCC | NO: 55 |
| ETXS578 | GmsUfsGmUfAmCfCmCfAfAmAmAmU | SEQ ID | GUGUACCCAAAAUUCC | SEQ ID |
| | mUfCmCfUmCmCmUmGmsAmsAm | NO: 176 | UCCUGAA | NO: 56 |
| ETXS580 | UmsUfsCmAfGmCfCmGfGfAmAmGmU | SEQ ID | UUCAGCCGGAAGUUGU | SEQ ID |
| | mUfGmUfGmGmUmUmGmsUmsGm | NO: 177 | GGUUGUG | NO: 57 |
| ETXS582 | UmsGfsUmUfUmGfUmCfAfUmGmCmU | SEQ ID | UGUUUGUCAUGCUUUU | SEQ ID |
| | mUfUmUfUmUmGmCmCmsAmsUm | NO: 178 | UUGCCAU | NO: 58 |
| ETXS584 | AmsUfsUmUfCmCfAmCfUfGmGmGmA | SEQ ID | AUUUCCACUGGGAAUU | SEQ ID |
| | mAfUmUfUmAmUmUmCmsAmsCm | NO: 179 | UAUUCAC | NO: 59 |
| ETXS586 | AmsCfsAmAfUmUfAmGfCfAmUmGmC | SEQ ID | ACAAUUAGCAUGCUGA | SEQ ID |
| | mUfGmAfUmGmCmCmCmsCmsCm | NO: 180 | UGCCCCC | NO: 60 |
| ETXS588 | GmsUfsUmCfUmGfUmUfUfGmUmCmA | SEQ ID | GUUCUGUUUGUCAUGC | SEQ ID |
| | mUfGmCfUmUmUmUmUmsUmsGm | NO: 181 | UUUUUUG | NO: 61 |
| ETXS590 | GmsGfsCmCfUmCfAmGfCfAmAmAmG | SEQ ID | GGCCUCAGCAAAGUAA | SEQ ID |
| | mUfAmAfUmAmCmUmCmsUmsCm | NO: 182 | UACUCUC | NO: 62 |
| ETXS592 | UmsUfsUmCfCmAfCmUmGmGmGmAm | SEQ ID | UUUCCACUGGGAAUUU | SEQ ID |
| | AmUfUmUfAmUmUmCmAmsCmsCm | NO: 183 | AUUCACC | NO: 43 |
| ETXS594 | GmsAfsUmCfCmUfUmUmGmAmAmGm | SEQ ID | GAUCCUUUGAAGUAGA | SEQ ID |
| | UmAfGmAfUmGmCmAmGmsUmsUm | NO: 184 | UGCAGUU | NO: 44 |
| ETXS596 | AmsUfsCmCfUmUfUmGmAmAmGmUm | SEQ ID | AUCCUUUGAAGUAGAU | SEQ ID |
| | AmGfAmUfGmCmAmGmUmsUmsGm | NO: 185 | GCAGUUG | NO: 45 |
| ETXS598 | AmsCfsUmUfGmUfUmCmAmUmGmGm | SEQ ID | ACUUGUUCAUGGGUCU | SEQ ID |
| | GmUfCmUfCmUmCmCmCmsUmsUm | NO: 186 | CUCCCUU | NO: 46 |
| ETXS600 | UmsCfsCmAfCmUfGmGmGmAmAmUm | SEQ ID | UCCACUGGGAAUUUAU | SEQ ID |
| | UmUfAmUfUmCmAmCmCmsCmsAm | NO: 187 | UCACCCA | NO: 47 |
| ETXS602 | UmsGfsUmAfCmCfCmAmAmAmAmUm | SEQ ID | UGUACCCAAAAUUCCU | SEQ ID |
| | UmCfCmUfCmCmUmGmAmsAmsGm | NO: 188 | CCUGAAG | NO: 48 |
| ETXS604 | UmsUfsCmCfCmAfUmGmAmAmGmAm | SEQ ID | UUCCCAUGAAGAGCAG | SEQ ID |
| | GmCfAmGfGmCmAmGmCmsUmsGm | NO: 189 | GCAGCUG | NO: 49 |
| ETXS606 | UmsCfsUmUfUmUfAmUmGmAmGmG | SEQ ID | UCUUUUAUGAGGCCCU | SEQ ID |
| | mCmCfCmUfUmGmGmUmGmsAmsGm | NO: 190 | UGGUGAG | NO: 50 |
| ETXS608 | AmsAfsCmUfGmCfUmUmCmUmGmGm | SEQ ID | AACUGCUUCUGGAUAU | SEQ ID |
| | AmUfAmUfAmAmAmGmGmsUmsCm | NO: 191 | AAAGGUC | NO: 51 |
| ETXS610 | CmsCfsUmUfUmGfAmAmGmUmAmGm | SEQ ID | CCUUUGAAGUAGAUGC | SEQ ID |
| | AmUfGmCfAmGmUmUmGmsAmsGm | NO: 192 | AGUUGAG | NO: 52 |
| ETXS612 | UmsUfsAmAfGmAfCmGmCmUmGmGm | SEQ ID | UUAAGACGCUGGAUCC | SEQ ID |
| | AmUfCmCfGmGmCmUmCmsUmsUm | NO: 193 | GGCUCUU | NO: 53 |
| ETXS614 | GmsAfsGmGfAmUfGmUmUmAmAmG | SEQ ID | GAGGAUGUUAAGACGC | SEQ ID |
| | mAmCfGmCfUmGmGmAmUmsCmsCm | NO: 194 | UGGAUCC | NO: 54 |
| ETXS616 | UmsCfsUmGfUmUfUmGmUmCmAmUm | SEQ ID | UCUGUUUGUCAUGCUU | SEQ ID |
| | GmCfUmUfUmUmUmUmGmsCmsCm | NO: 195 | UUUUGCC | NO: 55 |
| ETXS618 | GmsUfsGmUfAmCfCmCmAmAmAmAm | SEQ ID | GUGUACCCAAAAUUCC | SEQ ID |
| | UmUfCmCfUmCmCmUmGmsAmsAm | NO: 196 | UCCUGAA | NO: 56 |
| ETXS620 | UmsUfsCmAfGmCfCmGmGmAmAmGm | SEQ ID | UUCAGCCGGAAGUUGU | SEQ ID |
| | UmUfGmUfGmGmUmUmGmsUmsGm | NO: 197 | GGUUGUG | NO: 57 |
| ETXS622 | UmsGfsUmUfUmGfUmCmAmUmGmCm | SEQ ID | UGUUUGUCAUGCUUUU | SEQ ID |
| | UmUfUmUfUmUmGmCmCmsAmsUm | NO: 198 | UUGCCAU | NO: 58 |
| ETXS624 | AmsUfsUmUfCmCfAmCmUmGmGmGm | SEQ ID | AUUUCCACUGGGAAUU | SEQ ID |
| | AmAfUmUfUmAmUmUmCmsAmsCm | NO: 199 | UAUUCAC | NO: 59 |
| ETXS626 | AmsCfsAmAfUmUfAmGmCmAmUmGm | SEQ ID | ACAAUUAGCAUGCUGA | SEQ ID |
| | CmUfGmAfUmGmCmCmCmsCmsCm | NO: 200 | UGCCCCC | NO: 60 |
| ETXS628 | GmsUfsUmCfUmGfUmUmUmGmUmCm | SEQ ID | GUUCUGUUUGUCAUGC | SEQ ID |
| | AmUfGmCfUmUmUmUmUmsUmsGm | NO: 201 | UUUUUUG | NO: 61 |
| ETXS630 | GmsGfsCmCfUmCfAmGmCmAmAmAm | SEQ ID | GGCCUCAGCAAAGUAA | SEQ ID |
| | GmUfAmAfUmAmCmUmCmsUmsCm | NO: 202 | UACUCUC | NO: 62 |
| ETXS872 | AmsAfsAmUfCmCfUmUfGfUmGmGmA | SEQ ID | AAAUCCUUGUGGAUGA | SEQ ID |
| | mUfGmAfAmGmGmCmAmsAmsAm | NO: 203 | AGGCAAA | NO: 63 |
| ETXS874 | GmsCfsCmUfCmAfUmGfGfAmGmAmU | SEQ ID | GCCUCAUGGAGAUCUU | SEQ ID |
| | mCfUmUfUmCmGmCmAmsGmsCm | NO: 204 | UCGCAGC | NO: 64 |
| ETXS876 | UmsUfsCmUfCmCfAmUfGfAmGmGmA | SEQ ID | UUCUCCAUGAGGACCA | SEQ ID |
| | mCfCmAfCmCmAmGmCmsAmsUm | NO: 205 | CCAGCAU | NO: 65 |
| ETXS878 | UmsGfsCmCfUmCfAmUfGfGmAmGmA | SEQ ID | UGCCUCAUGGAGAUCU | SEQ ID |
| | mUfCmUfUmUmCmGmCmsAmsGm | NO: 206 | UUCGCAG | NO: 66 |
| ETXS880 | AmsGfsCmAfGmCfUmCfAfUmGmCmA | SEQ ID | AGCAGCUCAUGCAUCU | SEQ ID |
| | mUfCmUfCmAmUmAmCmsUmsUm | NO: 207 | CAUACUU | NO: 67 |
| ETXS882 | UmsCfsAmGfGmAfUmUfAfAmUmCmU | SEQ ID | UCAGGAUUAAUCUCAU | SEQ ID |
| | mCfAmUfCmAmAmAmCmsAmsGm | NO: 208 | CAAACAG | NO: 68 |
| ETXS884 | UmsUfsGmGfUmUfUmCfAfGmGmAmU | SEQ ID | UUGGUUUCAGGAUUAA | SEQ ID |
| | mUfAmAfUmCmUmCmAmsUmsCm | NO: 209 | UCUCAUC | NO: 69 |
| ETXS886 | GmsUfsUmUfCmAfGmGfAfUmUmAmA | SEQ ID | GUUUCAGGAUUAAUCU | SEQ ID |
| | mUfCmUfCmAmUmCmAmsAmsAm | NO: 210 | CAUCAAA | NO: 70 |
| ETXS888 | UmsGfsGmUfUmUfCmAfGfGmAmUmU | SEQ ID | UGGUUUCAGGAUUAAU | SEQ ID |
| | mAfAmUfCmUmCmAmUmsCmsAm | NO: 211 | CUCAUCA | NO: 71 |
| ETXS890 | GmsGfsUmUfUmCfAmGfGfAmUmUmA | SEQ ID | GGUUUCAGGAUUAAUC | SEQ ID |
| | mAfUmCfUmCmAmUmCmsAmsAm | NO: 212 | UCAUCAA | NO: 72 |
| ETXS892 | AmsGfsGmAfUmUfAmAfUfCmUmCmA | SEQ ID | AGGAUUAAUCUCAUCA | SEQ ID |
| | mUfCmAfAmAmCmAmGmsUmsUm | NO: 213 | AACAGUU | NO: 73 |
| ETXS894 | UmsCfsCmUfUmGfUmGfGfAmUmGmA | SEQ ID | UCCUUGUGGAUGAAGG | SEQ ID |
| | mAfGmGfCmAmAmAmAmsCmsUm | NO: 214 | CAAAACU | NO: 74 |
| ETXS896 | GmsUfsGmCfCmUfCmAfUfGmGmAmG | SEQ ID | GUGCCUCAUGGAGAUC | SEQ ID |
| | mAfUmCfUmUmUmCmGmsCmsAm | NO: 215 | UUUCGCA | NO: 75 |
| ETXS898 | UmsCfsUmCfCmAfUmGfAfGmGmAmC | SEQ ID | UCUCCAUGAGGACCAC | SEQ ID |
| | mCfAmCfCmAmGmCmAmsUmsGm | NO: 216 | CAGCAUG | NO: 76 |
| ETXS900 | CmsAfsAmAfAmUfCmCfUfUmGmUmG | SEQ ID | CAAAAUCCUUGUGGAU | SEQ ID |
| | mGfAmUfGmAmAmGmGmsCmsAm | NO: 217 | GAAGGCA | NO: 77 |
| ETXS902 | CmsGfsUmGfCmCfUmCfAfUmGmGmA | SEQ ID | CGUGCCUCAUGGAGAU | SEQ ID |
| | mGfAmUfCmUmUmUmCmsGmsCm | NO: 218 | CUUUCGC | NO: 78 |
| ETXS904 | AmsUfsCmAfAmAfAmUfCfCmUmUmG | SEQ ID | AUCAAAAUCCUUGUGG | SEQ ID |
| | mUfGmGfAmUmGmAmAmsGmsGm | NO: 219 | AUGAAGG | NO: 79 |
| ETXS906 | UmsUfsCmAfGmGfAmUfUfAmAmUmC | SEQ ID | UUCAGGAUUAAUCUCA | SEQ ID |
| | mUfCmAfUmCmAmAmAmsCmsAm | NO: 220 | UCAAACA | NO: 80 |
| ETXS908 | AmsAfsUmCfCmUfUmGfUfGmGmAmU | SEQ ID | AAUCCUUGUGGAUGAA | SEQ ID |
| | mGfAmAfGmGmCmAmAmsAmsAm | NO: 221 | GGCAAAA | NO: 81 |
| ETXS910 | CmsCfsAmUfCmGfUmGfCfCmUmCmA | SEQ ID | CCAUCGUGCCUCAUGG | SEQ ID |
| | mUfGmGfAmGmAmUmCmsUmsUm | NO: 222 | AGAUCUU | NO: 82 |
| ETXS912 | AmsAfsAmUfCmCfUmUfGfUmGmGmA | SEQ ID | AAAUCCUUGUGGAUGA | SEQ ID |
| | mUfGmAfAmGmGmCmAmsAmsAm | NO: 223 | AGGCAAA | NO: 63 |
| ETXS914 | GmsCfsCmUfCmAfUmGfGfAmGmAmU | SEQ ID | GCCUCAUGGAGAUCUU | SEQ ID |
| | mCfUmUfUmCmGmCmAmsGmsCm | NO: 224 | UCGCAGC | NO: 64 |
| ETXS916 | UmsUfsCmUfCmCfAmUfGfAmGmGmA | SEQ ID | UUCUCCAUGAGGACCA | SEQ ID |
| | mCfCmAfCmCmAmGmCmsAmsUm | NO: 225 | CCAGCAU | NO: 65 |
| ETXS918 | UmsGfsCmCfUmCfAmUfGfGmAmGmA | SEQ ID | UGCCUCAUGGAGAUCU | SEQ ID |
| | mUfCmUfUmUmCmGmCmsAmsGm | NO: 226 | UUCGCAG | NO: 66 |
| ETXS920 | AmsGfsCmAfGmCfUmCfAfUmGmCmA | SEQ ID | AGCAGCUCAUGCAUCU | SEQ ID |
| | mUfCmUfCmAmUmAmCmsUmsUm | NO: 227 | CAUACUU | NO: 67 |
| ETXS922 | UmsCfsAmGfGmAfUmUfAfAmUmCmU | SEQ ID | UCAGGAUUAAUCUCAU | SEQ ID |
| | mCfAmUfCmAmAmAmCmsAmsGm | NO: 228 | CAAACAG | NO: 68 |
| ETXS924 | UmsUfsGmGfUmUfUmCfAfGmGmAmU | SEQ ID | UUGGUUUCAGGAUUAA | SEQ ID |
| | mUfAmAfUmCmUmCmAmsUmsCm | NO: 229 | UCUCAUC | NO: 69 |
| ETXS926 | GmsUfsUmUfCmAfGmGfAfUmUmAmA | SEQ ID | GUUUCAGGAUUAAUCU | SEQ ID |
| | mUfCmUfCmAmUmCmAmsAmsAm | NO: 230 | CAUCAAA | NO: 70 |
| ETXS928 | UmsGfsGmUfUmUfCmAfGfGmAmUmU | SEQ ID | UGGUUUCAGGAUUAAU | SEQ ID |
| | mAfAmUfCmUmCmAmUmsCmsAm | NO: 231 | CUCAUCA | NO: 71 |
| ETXS930 | GmsGfsUmUfUmCfAmGfGfAmUmUmA | SEQ ID | GGUUUCAGGAUUAAUC | SEQ ID |
| | mAfUmCfUmCmAmUmCmsAmsAm | NO: 232 | UCAUCAA | NO: 72 |
| ETXS932 | AmsGfsGmAfUmUfAmAfUfCmUmCmA | SEQ ID | AGGAUUAAUCUCAUCA | SEQ ID |
| | mUfCmAfAmAmCmAmGmsUmsUm | NO: 233 | AACAGUU | NO: 73 |
| ETXS934 | UmsCfsCmUfUmGfUmGfGfAmUmGmA | SEQ ID | UCCUUGUGGAUGAAGG | SEQ ID |
| | mAfGmGfCmAmAmAmAmsCmsUm | NO: 234 | CAAAACU | NO: 74 |
| ETXS936 | GmsUfsGmCfCmUfCmAfUfGmGmAmG | SEQ ID | GUGCCUCAUGGAGAUC | SEQ ID |
| | mAfUmCfUmUmUmCmGmsCmsAm | NO: 235 | UUUCGCA | NO: 75 |
| ETXS938 | UmsCfsUmCfCmAfUmGfAfGmGmAmC | SEQ ID | UCUCCAUGAGGACCAC | SEQ ID |
| | mCfAmCfCmAmGmCmAmsUmsGm | NO: 236 | CAGCAUG | NO: 76 |
| ETXS940 | CmsAfsAmAfAmUfCmCfUfUmGmUmG | SEQ ID | CAAAAUCCUUGUGGAU | SEQ ID |
| | mGfAmUfGmAmAmGmGmsCmsAm | NO: 237 | GAAGGCA | NO: 77 |
| ETXS942 | CmsGfsUmGfCmCfUmCfAfUmGmGmA | SEQ ID | CGUGCCUCAUGGAGAU | SEQ ID |
| | mGfAmUfCmUmUmUmCmsGmsCm | NO: 238 | CUUUCGC | NO: 78 |
| ETXS944 | AmsUfsCmAfAmAfAmUfCfCmUmUmG | SEQ ID | AUCAAAAUCCUUGUGG | SEQ ID |
| | mUfGmGfAmUmGmAmAmsGmsGm | NO: 239 | AUGAAGG | NO: 79 |
| ETXS946 | UmsUfsCmAfGmGfAmUfUfAmAmUmC | SEQ ID | UUCAGGAUUAAUCUCA | SEQ ID |
| | mUfCmAfUmCmAmAmAmsCmsAm | NO: 240 | UCAAACA | NO: 80 |
| ETXS948 | AmsAfsUmCfCmUfUmGfUfGmGmAmU | SEQ ID | AAUCCUUGUGGAUGAA | SEQ ID |
| | mGfAmAfGmGmCmAmAmsAmsAm | NO: 241 | GGCAAAA | NO: 81 |
| ETXS950 | CmsCfsAmUfCmGfUmGfCfCmUmCmA | SEQ ID | CCAUCGUGCCUCAUGG | SEQ ID |
| | mUfGmGfAmGmAmUmCmsUmsUm | NO: 242 | AGAUCUU | NO: 82 |
| ETXS952 | AmsAfsAmUfCmCfUmUfGfUmGmGmA | SEQ ID | AAAUCCUUGUGGAUGA | SEQ ID |
| | mUfGmAfAmGmGmCmAmsAmsAm | NO: 243 | AGGCAAA | NO: 63 |
| ETXS954 | GmsCfsCmUfCmAfUmGfGfAmGmAmU | SEQ ID | GCCUCAUGGAGAUCUU | SEQ ID |
| | mCfUmUfUmCmGmCmAmsGmsCm | NO: 244 | UCGCAGC | NO: 64 |
| ETXS956 | UmsUfsCmUfCmCfAmUfGfAmGmGmA | SEQ ID | UUCUCCAUGAGGACCA | SEQ ID |
| | mCfCmAfCmCmAmGmCmsAmsUm | NO: 245 | CCAGCAU | NO: 65 |
| ETXS958 | UmsGfsCmCfUmCfAmUfGfGmAmGmA | SEQ ID | UGCCUCAUGGAGAUCU | SEQ ID |
| | mUfCmUfUmUmCmGmCmsAmsGm | NO: 246 | UUCGCAG | NO: 66 |
| ETXS960 | AmsGfsCmAfGmCfUmCfAfUmGmCmA | SEQ ID | AGCAGCUCAUGCAUCU | SEQ ID |
| | mUfCmUfCmAmUmAmCmsUmsUm | NO: 247 | CAUACUU | NO: 67 |
| ETXS962 | UmsCfsAmGfGmAfUmUfAfAmUmCmU | SEQ ID | UCAGGAUUAAUCUCAU | SEQ ID |
| | mCfAmUfCmAmAmAmCmsAmsGm | NO: 248 | CAAACAG | NO: 68 |
| ETXS964 | UmsUfsGmGfUmUfUmCfAfGmGmAmU | SEQ ID | UUGGUUUCAGGAUUAA | SEQ ID |
| | mUfAmAfUmCmUmCmAmsUmsCm | NO: 249 | UCUCAUC | NO: 69 |
| ETXS966 | GmsUfsUmUfCmAfGmGfAfUmUmAmA | SEQ ID | GUUUCAGGAUUAAUCU | SEQ ID |
| | mUfCmUfCmAmUmCmAmsAmsAm | NO: 250 | CAUCAAA | NO: 70 |
| ETXS968 | UmsGfsGmUfUmUfCmAfGfGmAmUmU | SEQ ID | UGGUUUCAGGAUUAAU | SEQ ID |
| | mAfAmUfCmUmCmAmUmsCmsAm | NO: 251 | CUCAUCA | NO: 71 |
| ETXS970 | GmsGfsUmUfUmCfAmGfGfAmUmUmA | SEQ ID | GGUUUCAGGAUUAAUC | SEQ ID |
| | mAfUmCfUmCmAmUmCmsAmsAm | NO: 252 | UCAUCAA | NO: 72 |
| ETXS972 | AmsGfsGmAfUmUfAmAfUfCmUmCmA | SEQ ID | AGGAUUAAUCUCAUCA | SEQ ID |
| | mUfCmAfAmAmCmAmGmsUmsUm | NO: 253 | AACAGUU | NO: 73 |
| ETXS974 | UmsCfsCmUfUmGfUmGfGfAmUmGmA | SEQ ID | UCCUUGUGGAUGAAGG | SEQ ID |
| | mAfGmGfCmAmAmAmAmsCmsUm | NO: 254 | CAAAACU | NO: 74 |
| ETXS976 | GmsUfsGmCfCmUfCmAfUfGmGmAmG | SEQ ID | GUGCCUCAUGGAGAUC | SEQ ID |
| | mAfUmCfUmUmUmCmGmsCmsAm | NO: 255 | UUUCGCA | NO: 75 |
| ETXS978 | UmsCfsUmCfCmAfUmGfAfGmGmAmC | SEQ ID | UCUCCAUGAGGACCAC | SEQ ID |
| | mCfAmCfCmAmGmCmAmsUmsGm | NO: 256 | CAGCAUG | NO: 76 |
| ETXS980 | CmsAfsAmAfAmUfCmCfUfUmGmUmG | SEQ ID | CAAAAUCCUUGUGGAU | SEQ ID |
| | mGfAmUfGmAmAmGmGmsCmsAm | NO: 257 | GAAGGCA | NO: 77 |
| ETXS982 | CmsGfsUmGfCmCfUmCfAfUmGmGmA | SEQ ID | CGUGCCUCAUGGAGAU | SEQ ID |
| | mGfAmUfCmUmUmUmCmsGmsCm | NO: 258 | CUUUCGC | NO: 78 |
| ETXS984 | AmsUfsCmAfAmAfAmUfCfCmUmUmG | SEQ ID | AUCAAAAUCCUUGUGG | SEQ ID |
| | mUfGmGfAmUmGmAmAmsGmsGm | NO: 259 | AUGAAGG | NO: 79 |
| ETXS986 | UmsUfsCmAfGmGfAmUfUfAmAmUmC | SEQ ID | UUCAGGAUUAAUCUCA | SEQ ID |
| | mUfCmAfUmCmAmAmAmsCmsAm | NO: 260 | UCAAACA | NO: 80 |
| ETXS988 | AmsAfsUmCfCmUfUmGfUfGmGmAmU | SEQ ID | AAUCCUUGUGGAUGAA | SEQ ID |
| | mGfAmAfGmGmCmAmAmsAmsAm | NO: 261 | GGCAAAA | NO: 81 |
| ETXS990 | CmsCfsAmUfCmGfUmGfCfCmUmCmA | SEQ ID | CCAUCGUGCCUCAUGG | SEQ ID |
| | mUfGmGfAmGmAmUmCmsUmsUm | NO: 262 | AGAUCUU | NO: 82 |
| ETXS992 | AmsAfsAmUfCmCfUmUmGmUmGmGm | SEQ ID | AAAUCCUUGUGGAUGA | SEQ ID |
| | AmUfGmAfAmGmGmCmAmsAmsAm | NO: 263 | AGGCAAA | NO: 63 |
| ETXS994 | GmsCfsCmUfCmAfUmGmGmAmGmAm | SEQ ID | GCCUCAUGGAGAUCUU | SEQ ID |
| | UmCfUmUfUmCmGmCmAmsGmsCm | NO: 264 | UCGCAGC | NO: 64 |
| ETXS996 | UmsUfsCmUfCmCfAmUmGmAmGmGm | SEQ ID | UUCUCCAUGAGGACCA | SEQ ID |
| | AmCfCmAfCmCmAmGmCmsAmsUm | NO: 265 | CCAGCAU | NO: 65 |
| ETXS998 | UmsGfsCmCfUmCfAmUmGmGmAmGm | SEQ ID | UGCCUCAUGGAGAUCU | SEQ ID |
| | AmUfCmUfUmUmCmGmCmsAmsGm | NO: 266 | UUCGCAG | NO: 66 |
| ETXS1000 | AmsGfsCmAfGmCfUmCmAmUmGmCm | SEQ ID | AGCAGCUCAUGCAUCU | SEQ ID |
| | AmUfCmUfCmAmUmAmCmsUmsUm | NO: 267 | CAUACUU | NO: 67 |
| ETXS1002 | UmsCfsAmGfGmAfUmUmAmAmUmCm | SEQ ID | UCAGGAUUAAUCUCAU | SEQ ID |
| | UmCfAmUfCmAmAmAmCmsAmsGm | NO: 268 | CAAACAG | NO: 68 |
| ETXS1004 | UmsUfsGmGfUmUfUmCmAmGmGmA | SEQ ID | UUGGUUUCAGGAUUAA | SEQ ID |
| | mUmUfAmAfUmCmUmCmAmsUmsCm | NO: 269 | UCUCAUC | NO: 69 |
| ETXS1006 | GmsUfsUmUfCmAfGmGmAmUmUmA | SEQ ID | GUUUCAGGAUUAAUCU | SEQ ID |
| | mAmUfCmUfCmAmUmCmAmsAmsAm | NO: 270 | CAUCAAA | NO: 70 |
| ETXS1008 | UmsGfsGmUfUmUfCmAmGmGmAmU | SEQ ID | UGGUUUCAGGAUUAAU | SEQ ID |
| | mUmAfAmUfCmUmCmAmUmsCmsAm | NO: 271 | CUCAUCA | NO: 71 |
| ETXS1010 | GmsGfsUmUfUmCfAmGmGmAmUmU | SEQ ID | GGUUUCAGGAUUAAUC | SEQ ID |
| | mAmAfUmCfUmCmAmUmCmsAmsAm | NO: 272 | UCAUCAA | NO: 72 |
| ETXS1012 | AmsGfsGmAfUmUfAmAmUmCmUmCm | SEQ ID | AGGAUUAAUCUCAUCA | SEQ ID |
| | AmUfCmAfAmAmCmAmGmsUmsUm | NO: 273 | AACAGUU | NO: 73 |
| ETXS1014 | UmsCfsCmUfUmGfUmGmGmAmUmGm | SEQ ID | UCCUUGUGGAUGAAGG | SEQ ID |
| | AmAfGmGfCmAmAmAmAmsCmsUm | NO: 274 | CAAAACU | NO: 74 |
| ETXS1016 | GmsUfsGmCfCmUfCmAmUmGmGmAm | SEQ ID | GUGCCUCAUGGAGAUC | SEQ ID |
| | GmAfUmCfUmUmUmCmGmsCmsAm | NO: 275 | UUUCGCA | NO: 75 |
| ETXS1018 | UmsCfsUmCfCmAfUmGmAmGmGmAm | SEQ ID | UCUCCAUGAGGACCAC | SEQ ID |
| | CmCfAmCfCmAmGmCmAmsUmsGm | NO: 276 | CAGCAUG | NO: 76 |
| ETXS1020 | CmsAfsAmAfAmUfCmCmUmUmGmUm | SEQ ID | CAAAAUCCUUGUGGAU | SEQ ID |
| | GmGfAmUfGmAmAmGmGmsCmsAm | NO: 277 | GAAGGCA | NO: 77 |
| ETXS1022 | CmsGfsUmGfCmCfUmCmAmUmGmGm | SEQ ID | CGUGCCUCAUGGAGAU | SEQ ID |
| | AmGfAmUfCmUmUmUmCmsGmsCm | NO: 278 | CUUUCGC | NO: 78 |
| ETXS1024 | AmsUfsCmAfAmAfAmUmCmCmUmUm | SEQ ID | AUCAAAAUCCUUGUGG | SEQ ID |
| | GmUfGmGfAmUmGmAmAmsGmsGm | NO: 279 | AUGAAGG | NO: 79 |
| ETXS1026 | UmsUfsCmAfGmGfAmUmUmAmAmU | SEQ ID | UUCAGGAUUAAUCUCA | SEQ ID |
| | mCmUfCmAfUmCmAmAmAmsCmsAm | NO: 280 | UCAAACA | NO: 80 |
| ETXS1028 | AmsAfsUmCfCmUfUmGmUmGmGmAm | SEQ ID | AAUCCUUGUGGAUGAA | SEQ ID |
| | UmGfAmAfGmGmCmAmAmsAmsAm | NO: 281 | GGCAAAA | NO: 81 |
| ETXS1030 | CmsCfsAmUfCmGfUmGmCmCmUmCm | SEQ ID | CCAUCGUGCCUCAUGG | SEQ ID |
| | AmUfGmGfAmGmAmUmCmsUmsUm | NO: 282 | AGAUCUU | NO: 82 |
| ETXS1036 | CmsAfsUmGfGmUfGmGmCmAmUmUm | SEQ ID | CAUGGUGGCAUUUCCU | SEQ ID |
| | UmCfCmUfUmGmGmUmAmsGmsGm | NO: 461 | UGGUAGG | NO: 449 |
| ETXS2398 | CmsAfsUmGmGmUfGmGmCfAmUmUm | SEQ ID | CAUGGUGGCAUUUCCU | SEQ ID |
| | UmCfCmUfUmGmGmUmAmsGmsGm | NO: 462 | UGGUAGG | NO: 449 |
| ETXS1040 | UmsCfsGmUfGmCfCmUmCmAmUmGm | SEQ ID | UCGUGCCUCAUGGAGA | SEQ ID |
| | GmAfGmAfUmCmUmUmUmsCmsGm | NO: 463 | UCUUUCG | NO: 450 |
| ETXS2416 | UmsCfsGmUmGmCfCmUmCfAmUmGm | SEQ ID | UCGUGCCUCAUGGAGA | SEQ ID |
| | GmAfGmAfUmCmUmUmUmsCmsGm | NO: 464 | UCUUUCG | NO: 450 |
| ETXS636 | GmsUfsUmCfUmGfUmUmUmGmUmCm | SEQ ID | GUUCUGUUUGUCAUGC | SEQ ID |
| | AmUfGmCfUmUmUmUmUmsUmsGm | NO: 465 | UUUUUUG | NO: 451 |
| ETXS2434 | GmsUfsUmCmUmGfUmUmUfGmUmCm | SEQ ID | GUUCUGUUUGUCAUGC | SEQ ID |
| | AmUfGmCfUmUmUmUmUmsUmsGm | NO: 466 | UUUUUUG | NO: 451 |
| ETXS644 | CmsGfsAmGfUmUfCmUmGmUmUmUm | SEQ ID | CGAGUUCUGUUUGUCA | SEQ ID |
| | GmUfCmAfUmGmCmUmUmsUmsUm | NO: 467 | UGCUUUU | NO: 452 |
| ETXS2452 | CmsGfsAmGmUmUfCmUmGfUmUmUm | SEQ ID | CGAGUUCUGUUUGUCA | SEQ ID |
| | GmUfCmAfUmGmCmUmUmsUmsUm | NO: 468 | UGCUUUU | NO: 452 |
| ETXS2400 | AmsUfsAmCfAmUfAmGmGmAmAmA | SEQ ID | AUACAUAGGAAAUUCA | SEQ ID |
| | mUmUfCmAfAmGmUmUmUmsAmsCm | NO: 469 | AGUUUAC | NO: 453 |
| ETXS2402 | AmsUfsAmCmAmUfAmGmGfAmAmA | SEQ ID | AUACAUAGGAAAUUCA | SEQ ID |
| | mUmUfCmAfAmGmUmUmUmsAmsCm | NO: 470 | AGUUUAC | NO: 453 |
| ETXS2406 | AmsAfsAmAfUmAfCmAmUmAmGmG | SEQ ID | AAAAUACAUAGGAAAU | SEQ ID |
| | mAmAfAmUfUmCmAmAmGmsUmsUm | NO: 471 | UCAAGUU | NO: 454 |
| ETXS2408 | AmsAfsAmAmUmAfCmAmUfAmGmG | SEQ ID | AAAAUACAUAGGAAAU | SEQ ID |
| | mAmAfAmUfUmCmAmAmGmsUmsUm | NO: 472 | UCAAGUU | NO: 454 |

[1575] Table 4 provides the modified second (sense) sequences, together with the corresponding unmodified second (sense) sequences for siRNA oligonucleosides (targeting HCII, ZPI and B4GALT1) according to the present invention as follows.

TABLE 4

| | | | Underlying Base | |
|---|---|---|---|---|
| | | | Sequence | |
| Sense | | SEQ ID | 5′→3′ (Shown | SEQ ID |
| strand | Modified Sense Strand | NO | as an Unmodified | NO |
| ID | 5′→3′ | (SS-mod) | Nucleotide Sequence) | (SS-unmod) |
| ETXS471 | UmsGmsAmAmUmAmAfAfUfUfCfCmC | SEQ ID | UGAAUAAAUUCCCAGU | SEQ ID |
| | mAmGmUmGmGmAfAmAm | NO: 283 | GGAAA | NO: 83 |
| ETXS473 | CmsUmsGmCmAmUmCfUfAfCfUfUmC | SEQ ID | CUGCAUCUACUUCAAA | SEQ ID |
| | mAmAmAmGmGmAfUmCm | NO: 284 | GGAUC | NO: 84 |
| ETXS475 | AmsCmsUmGmCmAmUfCfUfAfCfUmU | SEQ ID | ACUGCAUCUACUUCAA | SEQ ID |
| | mCmAmAmAmGmGfAmUm | NO: 285 | AGGAU | NO: 85 |
| ETXS477 | GmsGmsGmAmGmAmGfAfCfCfCfAmU | SEQ ID | GGGAGAGACCCAUGAA | SEQ ID |
| | mGmAmAmCmAmAfGmUm | NO: 286 | CAAGU | NO: 86 |
| ETXS479 | GmsGmsUmGmAmAmUfAfAfAfUfUmC | SEQ ID | GGUGAAUAAAUUCCCA | SEQ ID |
| | mCmCmAmGmUmGfGmAm | NO: 287 | GUGGA | NO: 87 |
| ETXS481 | UmsCmsAmGmGmAmGfGfAfAfUfUmU | SEQ ID | UCAGGAGGAAUUUUGG | SEQ ID |
| | mUmGmGmGmUmAfCmAm | NO: 288 | GUACA | NO: 88 |
| ETXS483 | GmsCmsUmGmCmCmUfGfCfUfCfUmU | SEQ ID | GCUGCCUGCUCUUCAU | SEQ ID |
| | mCmAmUmGmGmGfAmAm | NO: 289 | GGGAA | NO: 89 |
| ETXS485 | CmsAmsCmCmAmAmGfGfGfCfCfUmC | SEQ ID | CACCAAGGGCCUCAUA | SEQ ID |
| | mAmUmAmAmAmAfGmAm | NO: 290 | AAAGA | NO: 90 |
| ETXS487 | CmsCmsUmUmUmAmUfAfUfCfCfAmG | SEQ ID | CCUUUAUAUCCAGAAG | SEQ ID |
| | mAmAmGmCmAmGfUmUm | NO: 291 | CAGUU | NO: 91 |
| ETXS489 | CmsAmsAmCmUmGmCfAfUfCfUfAmC | SEQ ID | CAACUGCAUCUACUUC | SEQ ID |
| | mUmUmCmAmAmAfGmGm | NO: 292 | AAAGG | NO: 92 |
| ETXS491 | GmsAmsGmCmCmGmGfAfUfCfCfAmG | SEQ ID | GAGCCGGAUCCAGCGU | SEQ ID |
| | mCmGmUmCmUmUfAmAm | NO: 293 | CUUAA | NO: 93 |
| ETXS493 | AmsUmsCmCmAmGmCfGfUfCfUfUmA | SEQ ID | AUCCAGCGUCUUAACA | SEQ ID |
| | mAmCmAmUmCmCfUmCm | NO: 294 | UCCUC | NO: 94 |
| ETXS495 | CmsAmsAmAmAmAmAfGfCfAfUfGmA | SEQ ID | CAAAAAAGCAUGACAA | SEQ ID |
| | mCmAmAmAmCmAfGmAm | NO: 295 | ACAGA | NO: 95 |
| ETXS497 | CmsAmsGmGmAmGmGfAfAfUfUfUmU | SEQ ID | CAGGAGGAAUUUUGGG | SEQ ID |
| | mGmGmGmUmAmCfAmCm | NO: 296 | UACAC | NO: 96 |
| ETXS499 | CmsAmsAmCmCmAmCfAfAfCfUfUmC | SEQ ID | CAACCACAACUUCCGG | SEQ ID |
| | mCmGmGmCmUmGfAmAm | NO: 297 | CUGAA | NO: 97 |
| ETXS501 | GmsGmsCmAmAmAmAfAfAfGfCfAmU | SEQ ID | GGCAAAAAAGCAUGAC | SEQ ID |
| | mGmAmCmAmAmAfCmAm | NO: 298 | AAACA | NO: 98 |
| ETXS503 | GmsAmsAmUmAmAmAfUfUfCfCfCmA | SEQ ID | GAAUAAAUUCCCAGUG | SEQ ID |
| | mGmUmGmGmAmAfAmUm | NO: 299 | GAAAU | NO: 99 |
| ETXS505 | GmsGmsGmCmAmUmCfAfGfCfAfUmG | SEQ ID | GGGCAUCAGCAUGCUA | SEQ ID |
| | mCmUmAmAmUmUfGmUm | NO: 300 | AUUGU | NO: 100 |
| ETXS507 | AmsAmsAmAmAmGmCfAfUfGfAfCmA | SEQ ID | AAAAAGCAUGACAAAC | SEQ ID |
| | mAmAmCmAmGmAfAmCm | NO: 301 | AGAAC | NO: 101 |
| ETXS509 | GmsAmsGmUmAmUmUfAfCfUfUfUmG | SEQ ID | GAGUAUUACUUUGCUG | SEQ ID |
| | mCmUmGmAmGmGfCmCm | NO: 302 | AGGCC | NO: 102 |
| ETXS511 | UmsGmsAmAmUmAfAfAmUfUfCfCfC | SEQ ID | UGAAUAAAUUCCCAGU | SEQ ID |
| | mAmGmUmGmGmAmAmAm | NO: 303 | GGAAA | NO: 83 |
| ETXS513 | CmsUmsGmCmAmUfCfUmAfCfUfUfCm | SEQ ID | CUGCAUCUACUUCAAA | SEQ ID |
| | AmAmAmGmGmAmUmCm | NO: 304 | GGAUC | NO: 84 |
| ETXS515 | AmsCmsUmGmCmAfUfCmUfAfCfUfU | SEQ ID | ACUGCAUCUACUUCAA | SEQ ID |
| | mCmAmAmAmGmGmAmUm | NO: 305 | AGGAU | NO: 85 |
| ETXS517 | GmsGmsGmAmGmAfGfAmCfCfCfAfU | SEQ ID | GGGAGAGACCCAUGAA | SEQ ID |
| | mGmAmAmCmAmAmGmUm | NO: 306 | CAAGU | NO: 86 |
| ETXS519 | GmsGmsUmGmAmAfUfAmAfAfUfUfC | SEQ ID | GGUGAAUAAAUUCCCA | SEQ ID |
| | mCmCmAmGmUmGmGmAm | NO: 307 | GUGGA | NO: 87 |
| ETXS521 | UmsCmsAmGmGmAfGfGmAfAfUfUfU | SEQ ID | UCAGGAGGAAUUUUGG | SEQ ID |
| | mUmGmGmGmUmAmCmAm | NO: 308 | GUACA | NO: 88 |
| ETXS523 | GmsCmsUmGmCmCfUfGmCfUfCfUfUm | SEQ ID | GCUGCCUGCUCUUCAU | SEQ ID |
| | CmAmUmGmGmGmAmAm | NO: 309 | GGGAA | NO: 89 |
| ETXS525 | CmsAmsCmCmAmAfGfGmGfCfCfUfCm | SEQ ID | CACCAAGGGCCUCAUA | SEQ ID |
| | AmUmAmAmAmAmGmAm | NO: 310 | AAAGA | NO: 90 |
| ETXS527 | CmsCmsUmUmUmAfUfAmUfCfCfAfG | SEQ ID | CCUUUAUAUCCAGAAG | SEQ ID |
| | mAmAmGmCmAmGmUmUm | NO: 311 | CAGUU | NO: 91 |
| ETXS529 | CmsAmsAmCmUmGfCfAmUfCfUfAfCm | SEQ ID | CAACUGCAUCUACUUC | SEQ ID |
| | UmUmCmAmAmAmGmGm | NO: 312 | AAAGG | NO: 92 |
| ETXS531 | GmsAmsGmCmCmGfGfAmUfCfCfAfG | SEQ ID | GAGCCGGAUCCAGCGU | SEQ ID |
| | mCmGmUmCmUmUmAmAm | NO: 313 | CUUAA | NO: 93 |
| ETXS533 | AmsUmsCmCmAmGfCfGmUfCfUfUfA | SEQ ID | AUCCAGCGUCUUAACA | SEQ ID |
| | mAmCmAmUmCmCmUmCm | NO: 314 | UCCUC | NO: 94 |
| ETXS535 | CmsAmsAmAmAmAfAfGmCfAfUfGfA | SEQ ID | CAAAAAAGCAUGACAA | SEQ ID |
| | mCmAmAmAmCmAmGmAm | NO: 315 | ACAGA | NO: 95 |
| ETXS537 | CmsAmsGmGmAmGfGfAmAfUfUfUfU | SEQ ID | CAGGAGGAAUUUUGGG | SEQ ID |
| | mGmGmGmUmAmCmAmCm | NO: 316 | UACAC | NO: 96 |
| ETXS539 | CmsAmsAmCmCmAfCfAmAfCfUfUfCm | SEQ ID | CAACCACAACUUCCGG | SEQ ID |
| | CmGmGmCmUmGmAmAm | NO: 317 | CUGAA | NO: 97 |
| ETXS541 | GmsGmsCmAmAmAfAfAmAfGfCfAfU | SEQ ID | GGCAAAAAAGCAUGAC | SEQ ID |
| | mGmAmCmAmAmAmCmAm | NO: 318 | AAACA | NO: 98 |
| ETXS543 | GmsAmsAmUmAmAfAfUmUfCfCfCfA | SEQ ID | GAAUAAAUUCCCAGUG | SEQ ID |
| | mGmUmGmGmAmAmAmUm | NO: 319 | GAAAU | NO: 99 |
| ETXS545 | GmsGmsGmCmAmUfCfAmGfCfAfUfG | SEQ ID | GGGCAUCAGCAUGCUA | SEQ ID |
| | mCmUmAmAmUmUmGmUm | NO: 320 | AUUGU | NO: 100 |
| ETXS547 | AmsAmsAmAmAmGfCfAmUfGfAfCfA | SEQ ID | AAAAAGCAUGACAAAC | SEQ ID |
| | mAmAmCmAmGmAmAmCm | NO: 321 | AGAAC | NO: 101 |
| ETXS549 | GmsAmsGmUmAmUfUfAmCfUfUfUfG | SEQ ID | GAGUAUUACUUUGCUG | SEQ ID |
| | mCmUmGmAmGmGmCmCm | NO: 322 | AGGCC | NO: 102 |
| ETXS551 | UmsGmsAmAmUmAmAfAmUfUfCfCfC | SEQ ID | UGAAUAAAUUCCCAGU | SEQ ID |
| | mAmGmUmGmGmAmAmAm | NO: 323 | GGAAA | NO: 83 |
| ETXS553 | CmsUmsGmCmAmUmCfUmAfCfUfUfC | SEQ ID | CUGCAUCUACUUCAAA | SEQ ID |
| | mAmAmAmGmGmAmUmCm | NO: 324 | GGAUC | NO: 84 |
| ETXS555 | AmsCmsUmGmCmAmUfCmUfAfCfUfU | SEQ ID | ACUGCAUCUACUUCAA | SEQ ID |
| | mCmAmAmAmGmGmAmUm | NO: 325 | AGGAU | NO: 85 |
| ETXS557 | GmsGmsGmAmGmAmGfAmCfCfCfAfU | SEQ ID | GGGAGAGACCCAUGAA | SEQ ID |
| | mGmAmAmCmAmAmGmUm | NO: 326 | CAAGU | NO: 86 |
| ETXS559 | GmsGmsUmGmAmAmUfAmAfAfUfUfC | SEQ ID | GGUGAAUAAAUUCCCA | SEQ ID |
| | mCmCmAmGmUmGmGmAm | NO: 327 | GUGGA | NO: 87 |
| ETXS561 | UmsCmsAmGmGmAmGfGmAfAfUfUfU | SEQ ID | UCAGGAGGAAUUUUGG | SEQ ID |
| | mUmGmGmGmUmAmCmAm | NO: 328 | GUACA | NO: 88 |
| ETXS563 | GmsCmsUmGmCmCmUfGmCfUfCfUfU | SEQ ID | GCUGCCUGCUCUUCAU | SEQ ID |
| | mCmAmUmGmGmGmAmAm | NO: 329 | GGGAA | NO: 89 |
| ETXS565 | CmsAmsCmCmAmAmGfGmGfCfCfUfC | SEQ ID | CACCAAGGGCCUCAUA | SEQ ID |
| | mAmUmAmAmAmAmGmAm | NO: 330 | AAAGA | NO: 90 |
| ETXS567 | CmsCmsUmUmUmAmUfAmUfCfCfAfG | SEQ ID | CCUUUAUAUCCAGAAG | SEQ ID |
| | mAmAmGmCmAmGmUmUm | NO: 331 | CAGUU | NO: 91 |
| ETXS569 | CmsAmsAmCmUmGmCfAmUfCfUfAfC | SEQ ID | CAACUGCAUCUACUUC | SEQ ID |
| | mUmUmCmAmAmAmGmGm | NO: 332 | AAAGG | NO: 92 |
| ETXS571 | GmsAmsGmCmCmGmGfAmUfCfCfAfG | SEQ ID | GAGCCGGAUCCAGCGU | SEQ ID |
| | mCmGmUmCmUmUmAmAm | NO: 333 | CUUAA | NO: 93 |
| ETXS573 | AmsUmsCmCmAmGmCfGmUfCfUfUfA | SEQ ID | AUCCAGCGUCUUAACA | SEQ ID |
| | mAmCmAmUmCmCmUmCm | NO: 334 | UCCUC | NO: 94 |
| ETXS575 | CmsAmsAmAmAmAmAfGmCfAfUfGfA | SEQ ID | CAAAAAAGCAUGACAA | SEQ ID |
| | mCmAmAmAmCmAmGmAm | NO: 335 | ACAGA | NO: 95 |
| ETXS577 | CmsAmsGmGmAmGmGfAmAfUfUfUfU | SEQ ID | CAGGAGGAAUUUUGGG | SEQ ID |
| | mGmGmGmUmAmCmAmCm | NO: 336 | UACAC | NO: 96 |
| ETXS579 | CmsAmsAmCmCmAmCfAmAfCfUfUfC | SEQ ID | CAACCACAACUUCCGG | SEQ ID |
| | mCmGmGmCmUmGmAmAm | NO: 337 | CUGAA | NO: 97 |
| ETXS581 | GmsGmsCmAmAmAmAfAmAfGfCfAfU | SEQ ID | GGCAAAAAAGCAUGAC | SEQ ID |
| | mGmAmCmAmAmAmCmAm | NO: 338 | AAACA | NO: 98 |
| ETXS583 | GmsAmsAmUmAmAmAfUmUfCfCfCfA | SEQ ID | GAAUAAAUUCCCAGUG | SEQ ID |
| | mGmUmGmGmAmAmAmUm | NO: 339 | GAAAU | NO: 99 |
| ETXS585 | GmsGmsGmCmAmUmCfAmGfCfAfUfG | SEQ ID | GGGCAUCAGCAUGCUA | SEQ ID |
| | mCmUmAmAmUmUmGmUm | NO: 340 | AUUGU | NO: 100 |
| ETXS587 | AmsAmsAmAmAmGmCfAmUfGfAfCfA | SEQ ID | AAAAAGCAUGACAAAC | SEQ ID |
| | mAmAmCmAmGmAmAmCm | NO: 341 | AGAAC | NO: 101 |
| ETXS589 | GmsAmsGmUmAmUmUfAmCfUfUfUfG | SEQ ID | GAGUAUUACUUUGCUG | SEQ ID |
| | mCmUmGmAmGmGmCmCm | NO: 342 | AGGCC | NO: 102 |
| ETXS591 | UmsGmsAmAmUmAmAfAmUfUfCfCfC | SEQ ID | UGAAUAAAUUCCCAGU | SEQ ID |
| | mAmGmUmGmGmAmAmAm | NO: 343 | GGAAA | NO: 83 |
| ETXS593 | CmsUmsGmCmAmUmCfUmAfCfUfUfC | SEQ ID | CUGCAUCUACUUCAAA | SEQ ID |
| | mAmAmAmGmGmAmUmCm | NO: 344 | GGAUC | NO: 84 |
| ETXS595 | AmsCmsUmGmCmAmUfCmUfAfCfUfU | SEQ ID | ACUGCAUCUACUUCAA | SEQ ID |
| | mCmAmAmAmGmGmAmUm | NO: 345 | AGGAU | NO: 85 |
| ETXS597 | GmsGmsGmAmGmAmGfAmCfCfCfAfU | SEQ ID | GGGAGAGACCCAUGAA | SEQ ID |
| | mGmAmAmCmAmAmGmUm | NO: 346 | CAAGU | NO: 86 |
| ETXS599 | GmsGmsUmGmAmAmUfAmAfAfUfUfC | SEQ ID | GGUGAAUAAAUUCCCA | SEQ ID |
| | mCmCmAmGmUmGmGmAm | NO: 347 | GUGGA | NO: 87 |
| ETXS601 | UmsCmsAmGmGmAmGfGmAfAfUfUfU | SEQ ID | UCAGGAGGAAUUUUGG | SEQ ID |
| | mUmGmGmGmUmAmCmAm | NO: 348 | GUACA | NO: 88 |
| ETXS603 | GmsCmsUmGmCmCmUfGmCfUfCfUfU | SEQ ID | GCUGCCUGCUCUUCAU | SEQ ID |
| | mCmAmUmGmGmGmAmAm | NO: 349 | GGGAA | NO: 89 |
| ETXS605 | CmsAmsCmCmAmAmGfGmGfCfCfUfC | SEQ ID | CACCAAGGGCCUCAUA | SEQ ID |
| | mAmUmAmAmAmAmGmAm | NO: 350 | AAAGA | NO: 90 |
| ETXS607 | CmsCmsUmUmUmAmUfAmUfCfCfAfG | SEQ ID | CCUUUAUAUCCAGAAG | SEQ ID |
| | mAmAmGmCmAmGmUmUm | NO: 351 | CAGUU | NO: 91 |
| ETXS609 | CmsAmsAmCmUmGmCfAmUfCfUfAfC | SEQ ID | CAACUGCAUCUACUUC | SEQ ID |
| | mUmUmCmAmAmAmGmGm | NO: 352 | AAAGG | NO: 92 |
| ETXS611 | GmsAmsGmCmCmGmGfAmUfCfCfAfG | SEQ ID | GAGCCGGAUCCAGCGU | SEQ ID |
| | mCmGmUmCmUmUmAmAm | NO: 353 | CUUAA | NO: 93 |
| ETXS613 | AmsUmsCmCmAmGmCfGmUfCfUfUfA | SEQ ID | AUCCAGCGUCUUAACA | SEQ ID |
| | mAmCmAmUmCmCmUmCm | NO: 354 | UCCUC | NO: 94 |
| ETXS615 | CmsAmsAmAmAmAmAfGmCfAfUfGfA | SEQ ID | CAAAAAAGCAUGACAA | SEQ ID |
| | mCmAmAmAmCmAmGmAm | NO: 355 | ACAGA | NO: 95 |
| ETXS617 | CmsAmsGmGmAmGmGfAmAfUfUfUfU | SEQ ID | CAGGAGGAAUUUUGGG | SEQ ID |
| | mGmGmGmUmAmCmAmCm | NO: 356 | UACAC | NO: 96 |
| ETXS619 | CmsAmsAmCmCmAmCfAmAfCfUfUfC | SEQ ID | CAACCACAACUUCCGG | SEQ ID |
| | mCmGmGmCmUmGmAmAm | NO: 357 | CUGAA | NO: 97 |
| ETXS621 | GmsGmsCmAmAmAmAfAmAfGfCfAfU | SEQ ID | GGCAAAAAAGCAUGAC | SEQ ID |
| | mGmAmCmAmAmAmCmAm | NO: 358 | AAACA | NO: 98 |
| ETXS623 | GmsAmsAmUmAmAmAfUmUfCfCfCfA | SEQ ID | GAAUAAAUUCCCAGUG | SEQ ID |
| | mGmUmGmGmAmAmAmUm | NO: 359 | GAAAU | NO: 99 |
| ETXS625 | GmsGmsGmCmAmUmCfAmGfCfAfUfG | SEQ ID | GGGCAUCAGCAUGCUA | SEQ ID |
| | mCmUmAmAmUmUmGmUm | NO: 360 | AUUGU | NO: 100 |
| ETXS627 | AmsAmsAmAmAmGmCfAmUfGfAfCfA | SEQ ID | AAAAAGCAUGACAAAC | SEQ ID |
| | mAmAmCmAmGmAmAmCm | NO: 361 | AGAAC | NO: 101 |
| ETXS629 | GmsAmsGmUmAmUmUfAmCfUfUfUfG | SEQ ID | GAGUAUUACUUUGCUG | SEQ ID |
| | mCmUmGmAmGmGmCmCm | NO: 362 | AGGCC | NO: 102 |
| ETXS871 | UmsGmsCmCmUmUmCfAfUfCfCfAmC | SEQ ID | UGCCUUCAUCCACAAG | SEQ ID |
| | mAmAmGmGmAmUfUmUm | NO: 363 | GAUUU | NO: 103 |
| ETXS873 | UmsGmsCmGmAmAmAfGfAfUfCfUmC | SEQ ID | UGCGAAAGAUCUCCAU | SEQ ID |
| | mCmAmUmGmAmGfGmCm | NO: 364 | GAGGC | NO: 104 |
| ETXS875 | GmsCmsUmGmGmUmGfGfUfCfCfUmC | SEQ ID | GCUGGUGGUCCUCAUG | SEQ ID |
| | mAmUmGmGmAmGfAmAm | NO: 365 | GAGAA | NO: 105 |
| ETXS877 | GmsCmsGmAmAmAmGfAfUfCfUfCmC | SEQ ID | GCGAAAGAUCUCCAUG | SEQ ID |
| | mAmUmGmAmGmGfCmAm | NO: 366 | AGGCA | NO: 106 |
| ETXS879 | GmsUmsAmUmGmAmGfAfUfGfCfAmU | SEQ ID | GUAUGAGAUGCAUGAG | SEQ ID |
| | mGmAmGmCmUmGfCmUm | NO: 367 | CUGCU | NO: 107 |
| ETXS881 | GmsUmsUmUmGmAmUfGfAfGfAfUmU | SEQ ID | GUUUGAUGAGAUUAAU | SEQ ID |
| | mAmAmUmCmCmUfGmAm | NO: 368 | CCUGA | NO: 108 |
| ETXS883 | UmsGmsAmGmAmUmUfAfAfUfCfCmU | SEQ ID | UGAGAUUAAUCCUGAA | SEQ ID |
| | mGmAmAmAmCmCfAmAm | NO: 369 | ACCAA | NO: 109 |
| ETXS885 | UmsGmsAmUmGmAmGfAfUfUfAfAmU | SEQ ID | UGAUGAGAUUAAUCCU | SEQ ID |
| | mCmCmUmGmAmAfAmCm | NO: 370 | GAAAC | NO: 110 |
| ETXS887 | AmsUmsGmAmGmAmUfUfAfAfUfCmC | SEQ ID | AUGAGAUUAAUCCUGA | SEQ ID |
| | mUmGmAmAmAmCfCmAm | NO: 371 | AACCA | NO: 111 |
| ETXS889 | GmsAmsUmGmAmGmAfUfUfAfAfUmC | SEQ ID | GAUGAGAUUAAUCCUG | SEQ ID |
| | mCmUmGmAmAmAfCmCm | NO: 372 | AAACC | NO: 112 |
| ETXS891 | CmsUmsGmUmUmUmGfAfUfGfAfGmA | SEQ ID | CUGUUUGAUGAGAUUA | SEQ ID |
| | mUmUmAmAmUmCfCmUm | NO: 373 | AUCCU | NO: 113 |
| ETXS893 | UmsUmsUmUmGmCmCfUfUfCfAfUmC | SEQ ID | UUUUGCCUUCAUCCAC | SEQ ID |
| | mCmAmCmAmAmGfGmAm | NO: 374 | AAGGA | NO: 114 |
| ETXS895 | CmsGmsAmAmAmGmAfUfCfUfCfCmA | SEQ ID | CGAAAGAUCUCCAUGA | SEQ ID |
| | mUmGmAmGmGmCfAmCm | NO: 375 | GGCAC | NO: 115 |
| ETXS897 | UmsGmsCmUmGmGmUfGfGfUfCfCmU | SEQ ID | UGCUGGUGGUCCUCAU | SEQ ID |
| | mCmAmUmGmGmAfGmAm | NO: 376 | GGAGA | NO: 116 |
| ETXS899 | CmsCmsUmUmCmAmUfCfCfAfCfAmA | SEQ ID | CCUUCAUCCACAAGGA | SEQ ID |
| | mGmGmAmUmUmUfUmGm | NO: 377 | UUUUG | NO: 117 |
| ETXS901 | GmsAmsAmAmGmAmUfCfUfCfCfAmU | SEQ ID | GAAAGAUCUCCAUGAG | SEQ ID |
| | mGmAmGmGmCmAfCmGm | NO: 378 | GCACG | NO: 118 |
| ETXS903 | UmsUmsCmAmUmCmCfAfCfAfAfGmG | SEQ ID | UUCAUCCACAAGGAUU | SEQ ID |
| | mAmUmUmUmUmGfAmUm | NO: 379 | UUGAU | NO: 119 |
| ETXS905 | UmsUmsUmGmAmUmGfAfGfAfUfUmA | SEQ ID | UUUGAUGAGAUUAAUC | SEQ ID |
| | mAmUmCmCmUmGfAmAm | NO: 380 | CUGAA | NO: 120 |
| ETXS907 | UmsUmsGmCmCmUmUfCfAfUfCfCmA | SEQ ID | UUGCCUUCAUCCACAA | SEQ ID |
| | mCmAmAmGmGmAfUmUm | NO: 381 | GGAUU | NO: 121 |
| ETXS909 | GmsAmsUmCmUmCmCfAfUfGfAfGmG | SEQ ID | GAUCUCCAUGAGGCAC | SEQ ID |
| | mCmAmCmGmAmUfGmGm | NO: 382 | GAUGG | NO: 122 |
| ETXS911 | UmsGmsCmCmUmUfCfAmUfCfCfAfCm | SEQ ID | UGCCUUCAUCCACAAG | SEQ ID |
| | AmAmGmGmAmUmUmUm | NO: 383 | GAUUU | NO: 103 |
| ETXS913 | UmsGmsCmGmAmAfAfGmAfUfCfUfC | SEQ ID | UGCGAAAGAUCUCCAU | SEQ ID |
| | mCmAmUmGmAmGmGmCm | NO: 384 | GAGGC | NO: 104 |
| ETXS915 | GmsCmsUmGmGmUfGfGmUfCfCfUfC | SEQ ID | GCUGGUGGUCCUCAUG | SEQ ID |
| | mAmUmGmGmAmGmAmAm | NO: 385 | GAGAA | NO: 105 |
| ETXS917 | GmsCmsGmAmAmAfGfAmUfCfUfCfC | SEQ ID | GCGAAAGAUCUCCAUG | SEQ ID |
| | mAmUmGmAmGmGmCmAm | NO: 386 | AGGCA | NO: 106 |
| ETXS919 | GmsUmsAmUmGmAfGfAmUfGfCfAfU | SEQ ID | GUAUGAGAUGCAUGAG | SEQ ID |
| | mGmAmGmCmUmGmCmUm | NO: 387 | CUGCU | NO: 107 |
| ETXS921 | GmsUmsUmUmGmAfUfGmAfGfAfUfU | SEQ ID | GUUUGAUGAGAUUAAU | SEQ ID |
| | mAmAmUmCmCmUmGmAm | NO: 388 | CCUGA | NO: 108 |
| ETXS923 | UmsGmsAmGmAmUfUfAmAfUfCfCfU | SEQ ID | UGAGAUUAAUCCUGAA | SEQ ID |
| | mGmAmAmAmCmCmAmAm | NO: 389 | ACCAA | NO: 109 |
| ETXS925 | UmsGmsAmUmGmAfGfAmUfUfAfAfU | SEQ ID | UGAUGAGAUUAAUCCU | SEQ ID |
| | mCmCmUmGmAmAmAmCm | NO: 390 | GAAAC | NO: 110 |
| ETXS927 | AmsUmsGmAmGmAfUfUmAfAfUfCfC | SEQ ID | AUGAGAUUAAUCCUGA | SEQ ID |
| | mUmGmAmAmAmCmCmAm | NO: 391 | AACCA | NO: 111 |
| ETXS929 | GmsAmsUmGmAmGfAfUmUfAfAfUfC | SEQ ID | GAUGAGAUUAAUCCUG | SEQ ID |
| | mCmUmGmAmAmAmCmCm | NO: 392 | AAACC | NO: 112 |
| ETXS931 | CmsUmsGmUmUmUfGfAmUfGfAfGfA | SEQ ID | CUGUUUGAUGAGAUUA | SEQ ID |
| | mUmUmAmAmUmCmCmUm | NO: 393 | AUCCU | NO: 113 |
| ETXS933 | UmsUmsUmUmGmCfCfUmUfCfAfUfC | SEQ ID | UUUUGCCUUCAUCCAC | SEQ ID |
| | mCmAmCmAmAmGmGmAm | NO: 394 | AAGGA | NO: 114 |
| ETXS935 | CmsGmsAmAmAmGfAfUmCfUfCfCfA | SEQ ID | CGAAAGAUCUCCAUGA | SEQ ID |
| | mUmGmAmGmGmCmAmCm | NO: 395 | GGCAC | NO: 115 |
| ETXS937 | UmsGmsCmUmGmGfUfGmGfUfCfCfU | SEQ ID | UGCUGGUGGUCCUCAU | SEQ ID |
| | mCmAmUmGmGmAmGmAm | NO: 396 | GGAGA | NO: 116 |
| ETXS939 | CmsCmsUmUmCmAfUfCmCfAfCfAfAm | SEQ ID | CCUUCAUCCACAAGGA | SEQ ID |
| | GmGmAmUmUmUmUmGm | NO: 397 | UUUUG | NO: 117 |
| ETXS941 | GmsAmsAmAmGmAfUfCmUfCfCfAfU | SEQ ID | GAAAGAUCUCCAUGAG | SEQ ID |
| | mGmAmGmGmCmAmCmGm | NO: 398 | GCACG | NO: 118 |
| ETXS943 | UmsUmsCmAmUmCfCfAmCfAfAfGfG | SEQ ID | UUCAUCCACAAGGAUU | SEQ ID |
| | mAmUmUmUmUmGmAmUm | NO: 399 | UUGAU | NO: 119 |
| ETXS945 | UmsUmsUmGmAmUfGfAmGfAfUfUfA | SEQ ID | UUUGAUGAGAUUAAUC | SEQ ID |
| | mAmUmCmCmUmGmAmAm | NO: 400 | CUGAA | NO: 120 |
| ETXS947 | UmsUmsGmCmCmUfUfCmAfUfCfCfAm | SEQ ID | UUGCCUUCAUCCACAA | SEQ ID |
| | CmAmAmGmGmAmUmUm | NO: 401 | GGAUU | NO: 121 |
| ETXS949 | GmsAmsUmCmUmCfCfAmUfGfAfGfG | SEQ ID | GAUCUCCAUGAGGCAC | SEQ ID |
| | mCmAmCmGmAmUmGmGm | NO: 402 | GAUGG | NO: 122 |
| ETXS951 | UmsGmsCmCmUmUmCfAmUfCfCfAfC | SEQ ID | UGCCUUCAUCCACAAG | SEQ ID |
| | mAmAmGmGmAmUmUmUm | NO: 403 | GAUUU | NO: 103 |
| ETXS953 | UmsGmsCmGmAmAmAfGmAfUfCfUfC | SEQ ID | UGCGAAAGAUCUCCAU | SEQ ID |
| | mCmAmUmGmAmGmGmCm | NO: 404 | GAGGC | NO: 104 |
| ETXS955 | GmsCmsUmGmGmUmGfGmUfCfCfUfC | SEQ ID | GCUGGUGGUCCUCAUG | SEQ ID |
| | mAmUmGmGmAmGmAmAm | NO: 405 | GAGAA | NO: 105 |
| ETXS957 | GmsCmsGmAmAmAmGfAmUfCfUfCfC | SEQ ID | GCGAAAGAUCUCCAUG | SEQ ID |
| | mAmUmGmAmGmGmCmAm | NO: 406 | AGGCA | NO: 106 |
| ETXS959 | GmsUmsAmUmGmAmGfAmUfGfCfAfU | SEQ ID | GUAUGAGAUGCAUGAG | SEQ ID |
| | mGmAmGmCmUmGmCmUm | NO: 407 | CUGCU | NO: 107 |
| ETXS961 | GmsUmsUmUmGmAmUfGmAfGfAfUfU | SEQ ID | GUUUGAUGAGAUUAAU | SEQ ID |
| | mAmAmUmCmCmUmGmAm | NO: 408 | CCUGA | NO: 108 |
| ETXS963 | UmsGmsAmGmAmUmUfAmAfUfCfCfU | SEQ ID | UGAGAUUAAUCCUGAA | SEQ ID |
| | mGmAmAmAmCmCmAmAm | NO: 409 | ACCAA | NO: 109 |
| ETXS965 | UmsGmsAmUmGmAmGfAmUfUfAfAfU | SEQ ID | UGAUGAGAUUAAUCCU | SEQ ID |
| | mCmCmUmGmAmAmAmCm | NO: 410 | GAAAC | NO: 110 |
| ETXS967 | AmsUmsGmAmGmAmUfUmAfAfUfCfC | SEQ ID | AUGAGAUUAAUCCUGA | SEQ ID |
| | mUmGmAmAmAmCmCmAm | NO: 411 | AACCA | NO: 111 |
| ETXS969 | GmsAmsUmGmAmGmAfUmUfAfAfUfC | SEQ ID | GAUGAGAUUAAUCCUG | SEQ ID |
| | mCmUmGmAmAmAmCmCm | NO: 412 | AAACC | NO: 112 |
| ETXS971 | CmsUmsGmUmUmUmGfAmUfGfAfGfA | SEQ ID | CUGUUUGAUGAGAUUA | SEQ ID |
| | mUmUmAmAmUmCmCmUm | NO: 413 | AUCCU | NO: 113 |
| ETXS973 | UmsUmsUmUmGmCmCfUmUfCfAfUfC | SEQ ID | UUUUGCCUUCAUCCAC | SEQ ID |
| | mCmAmCmAmAmGmGmAm | NO: 414 | AAGGA | NO: 114 |
| ETXS975 | CmsGmsAmAmAmGmAfUmCfUfCfCfA | SEQ ID | CGAAAGAUCUCCAUGA | SEQ ID |
| | mUmGmAmGmGmCmAmCm | NO: 415 | GGCAC | NO: 115 |
| ETXS977 | UmsGmsCmUmGmGmUfGmGfUfCfCfU | SEQ ID | UGCUGGUGGUCCUCAU | SEQ ID |
| | mCmAmUmGmGmAmGmAm | NO: 416 | GGAGA | NO: 116 |
| ETXS979 | CmsCmsUmUmCmAmUfCmCfAfCfAfA | SEQ ID | CCUUCAUCCACAAGGA | SEQ ID |
| | mGmGmAmUmUmUmUmGm | NO: 417 | UUUUG | NO: 117 |
| ETXS981 | GmsAmsAmAmGmAmUfCmUfCfCfAfU | SEQ ID | GAAAGAUCUCCAUGAG | SEQ ID |
| | mGmAmGmGmCmAmCmGm | NO: 418 | GCACG | NO: 118 |
| ETXS983 | UmsUmsCmAmUmCmCfAmCfAfAfGfG | SEQ ID | UUCAUCCACAAGGAUU | SEQ ID |
| | mAmUmUmUmUmGmAmUm | NO: 419 | UUGAU | NO: 119 |
| ETXS985 | UmsUmsUmGmAmUmGfAmGfAfUfUfA | SEQ ID | UUUGAUGAGAUUAAUC | SEQ ID |
| | mAmUmCmCmUmGmAmAm | NO: 420 | CUGAA | NO: 120 |
| ETXS987 | UmsUmsGmCmCmUmUfCmAfUfCfCfA | SEQ ID | UUGCCUUCAUCCACAA | SEQ ID |
| | mCmAmAmGmGmAmUmUm | NO: 421 | GGAUU | NO: 121 |
| ETXS989 | GmsAmsUmCmUmCmCfAmUfGfAfGfG | SEQ ID | GAUCUCCAUGAGGCAC | SEQ ID |
| | mCmAmCmGmAmUmGmGm | NO: 422 | GAUGG | NO: 122 |
| ETXS991 | UmsGmsCmCmUmUmCfAmUfCfCfAfC | SEQ ID | UGCCUUCAUCCACAAG | SEQ ID |
| | mAmAmGmGmAmUmUmUm | NO: 423 | GAUUU | NO: 103 |
| ETXS993 | UmsGmsCmGmAmAmAfGmAfUfCfUfC | SEQ ID | UGCGAAAGAUCUCCAU | SEQ ID |
| | mCmAmUmGmAmGmGmCm | NO: 424 | GAGGC | NO: 104 |
| ETXS995 | GmsCmsUmGmGmUmGfGmUfCfCfUfC | SEQ ID | GCUGGUGGUCCUCAUG | SEQ ID |
| | mAmUmGmGmAmGmAmAm | NO: 425 | GAGAA | NO: 105 |
| ETXS997 | GmsCmsGmAmAmAmGfAmUfCfUfCfC | SEQ ID | GCGAAAGAUCUCCAUG | SEQ ID |
| | mAmUmGmAmGmGmCmAm | NO: 426 | AGGCA | NO: 106 |
| ETXS999 | GmsUmsAmUmGmAmGfAmUfGfCfAfU | SEQ ID | GUAUGAGAUGCAUGAG | SEQ ID |
| | mGmAmGmCmUmGmCmUm | NO: 427 | CUGCU | NO: 107 |
| ETXS1001 | GmsUmsUmUmGmAmUfGmAfGfAfUfU | SEQ ID | GUUUGAUGAGAUUAAU | SEQ ID |
| | mAmAmUmCmCmUmGmAm | NO: 428 | CCUGA | NO: 108 |
| ETXS1003 | UmsGmsAmGmAmUmUfAmAfUfCfCfU | SEQ ID | UGAGAUUAAUCCUGAA | SEQ ID |
| | mGmAmAmAmCmCmAmAm | NO: 429 | ACCAA | NO: 109 |
| ETXS1005 | UmsGmsAmUmGmAmGfAmUfUfAfAfU | SEQ ID | UGAUGAGAUUAAUCCU | SEQ ID |
| | mCmCmUmGmAmAmAmCm | NO: 430 | GAAAC | NO: 110 |
| ETXS1007 | AmsUmsGmAmGmAmUfUmAfAfUfCfC | SEQ ID | AUGAGAUUAAUCCUGA | SEQ ID |
| | mUmGmAmAmAmCmCmAm | NO: 431 | AACCA | NO: 111 |
| ETXS1009 | GmsAmsUmGmAmGmAfUmUfAfAfUfC | SEQ ID | GAUGAGAUUAAUCCUG | SEQ ID |
| | mCmUmGmAmAmAmCmCm | NO: 432 | AAACC | NO: 112 |
| ETXS1011 | CmsUmsGmUmUmUmGfAmUfGfAfGfA | SEQ ID | CUGUUUGAUGAGAUUA | SEQ ID |
| | mUmUmAmAmUmCmCmUm | NO: 433 | AUCCU | NO: 113 |
| ETXS1013 | UmsUmsUmUmGmCmCfUmUfCfAfUfC | SEQ ID | UUUUGCCUUCAUCCAC | SEQ ID |
| | mCmAmCmAmAmGmGmAm | NO: 434 | AAGGA | NO: 114 |
| ETXS1015 | CmsGmsAmAmAmGmAfUmCfUfCfCfA | SEQ ID | CGAAAGAUCUCCAUGA | SEQ ID |
| | mUmGmAmGmGmCmAmCm | NO: 435 | GGCAC | NO: 115 |
| ETXS1017 | UmsGmsCmUmGmGmUfGmGfUfCfCfU | SEQ ID | UGCUGGUGGUCCUCAU | SEQ ID |
| | mCmAmUmGmGmAmGmAm | NO: 436 | GGAGA | NO: 116 |
| ETXS1019 | CmsCmsUmUmCmAmUfCmCfAfCfAfA | SEQ ID | CCUUCAUCCACAAGGA | SEQ ID |
| | mGmGmAmUmUmUmUmGm | NO: 437 | UUUUG | NO: 117 |
| ETXS1021 | GmsAmsAmAmGmAmUfCmUfCfCfAfU | SEQ ID | GAAAGAUCUCCAUGAG | SEQ ID |
| | mGmAmGmGmCmAmCmGm | NO: 438 | GCACG | NO: 118 |
| ETXS1023 | UmsUmsCmAmUmCmCfAmCfAfAfGfG | SEQ ID | UUCAUCCACAAGGAUU | SEQ ID |
| | mAmUmUmUmUmGmAmUm | NO: 439 | UUGAU | NO: 119 |
| ETXS1025 | UmsUmsUmGmAmUmGfAmGfAfUfUfA | SEQ ID | UUUGAUGAGAUUAAUC | SEQ ID |
| | mAmUmCmCmUmGmAmAm | NO: 440 | CUGAA | NO: 120 |
| ETXS1027 | UmsUmsGmCmCmUmUfCmAfUfCfCfA | SEQ ID | UUGCCUUCAUCCACAA | SEQ ID |
| | mCmAmAmGmGmAmUmUm | NO: 441 | GGAUU | NO: 121 |
| ETXS1029 | GmsAmsUmCmUmCmCfAmUfGfAfGfG | SEQ ID | GAUCUCCAUGAGGCAC | SEQ ID |
| | mCmAmCmGmAmUmGmGm | NO: 442 | GAUGG | NO: 122 |
| ETXS1035 | iaiaUmsAmsCmCmAmAmGfGmAfAfAf | SEQ ID | UACCAAGGAAAUGCCA | SEQ ID |
| | UfGmCmCmAmCmCmAmUmGm | NO: 473 | CCAUG | NO: 455 |
| ETXS2397 | iaiaUmsAmsCmCmAmAmGmGmAfAfAf | SEQ ID | UACCAAGGAAAUGCCA | SEQ ID |
| | UmGmCmCmAmCmCmAmUmGm | NO: 474 | CCAUG | NO: 455 |
| ETXS1039 | iaiaAmsAmsAmGmAmUmCfUmCfCfAf | SEQ ID | AAAGAUCUCCAUGAGG | SEQ ID |
| | UfGmAmGmGmCmAmCmGmAm | NO: 475 | CACGA | NO: 456 |
| ETXS2399 | iaiaAmsAmsAmGmAmUmCmUmCfCfAf | SEQ ID | AAAGAUCUCCAUGAGG | SEQ ID |
| | UmGmAmGmGmCmAmCmGmAm | NO: 476 | CACGA | NO: 456 |
| ETXS635 | iaiaAmsAmsAmAmAmGmCfAmUfGfAf | SEQ ID | AAAAAGCAUGACAAAC | SEQ ID |
| | CfAmAmAmCmAmGmAmAmCm | NO: 477 | AGAAC | NO: 457 |
| ETXS2433 | iaiaAmsAmsAmAmAmGmCmAmUfGfAf | SEQ ID | AAAAAGCAUGACAAAC | SEQ ID |
| | CmAmAmAmCmAmGmAmAmCm | NO: 478 | AGAAC | NO: 457 |
| ETXS643 | iaiaAmsAmsGmCmAmUmGfAmCfAfAf | SEQ ID | AAGCAUGACAAACAGA | SEQ ID |
| | AfCmAmGmAmAmCmUmCmGm | NO: 479 | ACUCG | NO: 458 |
| ETXS2435 | iaiaAmsAmsGmCmAmUmGmAmCfAfAf | SEQ ID | AAGCAUGACAAACAGA | SEQ ID |
| | AmCmAmGmAmAmCmUmCmGm | NO: 480 | ACUCG | NO: 458 |
| ETXS2399 | iaiaAmsAmsAmCmUmUmGfAmAfUfUf | SEQ ID | AAACUUGAAUUUCCUA | SEQ ID |
| | UfCmCmUmAmUmGmUmAmUm | NO: 481 | UGUAU | NO: 459 |
| ETXS2401 | iaiaAmsAmsAmCmUmUmGmAmAfUfUf | SEQ ID | AAACUUGAAUUUCCUA | SEQ ID |
| | UmCmCmUmAmUmGmUmAmUm | NO: 482 | UGUAU | NO: 459 |
| ETXS2405 | iaiaCmsUmsUmGmAmAmUfUmUfCfCf | SEQ ID | CUUGAAUUUCCUAUGU | SEQ ID |
| | UfAmUmGmUmAmUmUmUmUm | NO: 483 | AUUUU | NO: 460 |
| ETXS2407 | iaiaCmsUmsUmGmAmAmUmUmUfCfCf | SEQ ID | CUUGAAUUUCCUAUGU | SEQ ID |
| | UmAmUmGmUmAmUmUmUmUm | NO: 484 | AUUUU | NO: 460 |

[1576] Some of the modified second strand sequences as illustrated above in Table 4 include the preferred 5′ iaia motif. However, it should also be understood that the scope of these modified second strand sequences additionally includes the Me/F modified second strand in the absence of the 5′iaia motif.

[1577] Table 5 identifies duplexes with Duplex IDs referencing the modified antisense and sense TDs from previous Tables 3 and 4.

TABLE 5

| Duplex ID | Antisense strand ID | Sense strand ID |
|---|---|---|
| ETXM236 | ETXS472 | ETXS471 |
| ETXM237 | ETXS474 | ETXS473 |
| ETXM238 | ETXS476 | ETXS475 |
| ETXM239 | ETXS478 | ETXS477 |
| ETXM240 | ETXS480 | ETXS479 |
| ETXM241 | ETXS482 | ETXS481 |
| ETXM242 | ETXS484 | ETXS483 |
| ETXM243 | ETXS486 | ETXS485 |
| ETXM244 | ETXS488 | ETXS487 |
| ETXM245 | ETXS490 | ETXS489 |
| ETXM246 | ETXS492 | ETXS491 |
| ETXM247 | ETXS494 | ETXS493 |
| ETXM248 | ETXS496 | ETXS495 |
| ETXM249 | ETXS498 | ETXS497 |
| ETXM250 | ETXS500 | ETXS499 |
| ETXM251 | ETXS502 | ETXS501 |
| ETXM252 | ETXS504 | ETXS503 |
| ETXM253 | ETXS506 | ETXS505 |
| ETXM254 | ETXS508 | ETXS507 |
| ETXM255 | ETXS510 | ETXS509 |
| ETXM256 | ETXS512 | ETXS511 |
| ETXM257 | ETXS514 | ETXS513 |
| ETXM258 | ETXS516 | ETXS515 |
| ETXM259 | ETXS518 | ETXS517 |
| ETXM260 | ETXS520 | ETXS519 |
| ETXM261 | ETXS522 | ETXS521 |
| ETXM262 | ETXS524 | ETXS523 |
| ETXM263 | ETXS526 | ETXS525 |
| ETXM264 | ETXS528 | ETXS527 |
| ETXM265 | ETXS530 | ETXS529 |
| ETXM266 | ETXS532 | ETXS531 |
| ETXM267 | ETXS534 | ETXS533 |
| ETXM268 | ETXS536 | ETXS535 |
| ETXM269 | ETXS538 | ETXS537 |
| ETXM270 | ETXS540 | ETXS539 |
| ETXM271 | ETXS542 | ETXS541 |
| ETXM272 | ETXS544 | ETXS543 |
| ETXM273 | ETXS546 | ETXS545 |
| ETXM274 | ETXS548 | ETXS547 |
| ETXM275 | ETXS550 | ETXS549 |
| ETXM276 | ETXS552 | ETXS551 |
| ETXM277 | ETXS554 | ETXS553 |
| ETXM278 | ETXS556 | ETXS555 |
| ETXM279 | ETXS558 | ETXS557 |
| ETXM280 | ETXS560 | ETXS559 |
| ETXM281 | ETXS562 | ETXS561 |
| ETXM282 | ETXS564 | ETXS563 |
| ETXM283 | ETXS566 | ETXS565 |
| ETXM284 | ETXS568 | ETXS567 |
| ETXM285 | ETXS570 | ETXS569 |
| ETXM286 | ETXS572 | ETXS571 |
| ETXM287 | ETXS574 | ETXS573 |
| ETXM288 | ETXS576 | ETXS575 |
| ETXM289 | ETXS578 | ETXS577 |
| ETXM290 | ETXS580 | ETXS579 |
| ETXM291 | ETXS582 | ETXS581 |
| ETXM292 | ETXS584 | ETXS583 |
| ETXM293 | ETXS586 | ETXS585 |
| ETXM294 | ETXS588 | ETXS587 |
| ETXM295 | ETXS590 | ETXS589 |
| ETXM296 | ETXS592 | ETXS591 |
| ETXM297 | ETXS594 | ETXS593 |
| ETXM298 | ETXS596 | ETXS595 |
| ETXM299 | ETXS598 | ETXS597 |
| ETXM300 | ETXS600 | ETXS599 |
| ETXM301 | ETXS602 | ETXS601 |
| ETXM302 | ETXS604 | ETXS603 |
| ETXM303 | ETXS606 | ETXS605 |
| ETXM304 | ETXS608 | ETXS607 |
| ETXM305 | ETXS610 | ETXS609 |
| ETXM306 | ETXS612 | ETXS611 |
| ETXM307 | ETXS614 | ETXS613 |
| ETXM308 | ETXS616 | ETXS615 |
| ETXM309 | ETXS618 | ETXS617 |
| ETXM310 | ETXS620 | ETXS619 |
| ETXM311 | ETXS622 | ETXS621 |
| ETXM312 | ETXS624 | ETXS623 |
| ETXM313 | ETXS626 | ETXS625 |
| ETXM314 | ETXS628 | ETXS627 |
| ETXM315 | ETXS630 | ETXS629 |
| ETXM436 | ETXS872 | ETXS871 |
| ETXM437 | ETXS874 | ETXS873 |
| ETXM438 | ETXS876 | ETXS875 |
| ETXM439 | ETXS878 | ETXS877 |
| ETXM440 | ETXS880 | ETXS879 |
| ETXM441 | ETXS882 | ETXS881 |
| ETXM442 | ETXS884 | ETXS883 |
| ETXM443 | ETXS886 | ETXS885 |
| ETXM444 | ETXS888 | ETXS887 |
| ETXM445 | ETXS890 | ETXS889 |
| ETXM446 | ETXS892 | ETXS891 |
| ETXM447 | ETXS894 | ETXS893 |
| ETXM448 | ETXS896 | ETXS895 |
| ETXM449 | ETXS898 | ETXS897 |
| ETXM450 | ETXS900 | ETXS899 |
| ETXM451 | ETXS902 | ETXS901 |
| ETXM452 | ETXS904 | ETXS903 |
| ETXM453 | ETXS906 | ETXS905 |
| ETXM454 | ETXS908 | ETXS907 |
| ETXM455 | ETXS910 | ETXS909 |
| ETXM456 | ETXS912 | ETXS911 |
| ETXM457 | ETXS914 | ETXS913 |
| ETXM458 | ETXS916 | ETXS915 |
| ETXM459 | ETXS918 | ETXS917 |
| ETXM460 | ETXS920 | ETXS919 |
| ETXM461 | ETXS922 | ETXS921 |
| ETXM462 | ETXS924 | ETXS923 |
| ETXM463 | ETXS926 | ETXS925 |
| ETXM464 | ETXS928 | ETXS927 |
| ETXM465 | ETXS930 | ETXS929 |
| ETXM466 | ETXS932 | ETXS931 |
| ETXM467 | ETXS934 | ETXS933 |
| ETXM468 | ETXS936 | ETXS935 |
| ETXM469 | ETXS938 | ETXS937 |
| ETXM470 | ETXS940 | ETXS939 |
| ETXM471 | ETXS942 | ETXS941 |
| ETXM472 | ETXS944 | ETXS943 |
| ETXM473 | ETXS946 | ETXS945 |
| ETXM474 | ETXS948 | ETXS947 |
| ETXM475 | ETXS950 | ETXS949 |
| ETXM476 | ETXS952 | ETXS951 |
| ETXM477 | ETXS954 | ETXS953 |
| ETXM478 | ETXS956 | ETXS955 |
| ETXM479 | ETXS958 | ETXS957 |
| ETXM480 | ETXS960 | ETXS959 |
| ETXM481 | ETXS962 | ETXS961 |
| ETXM482 | ETXS964 | ETXS963 |
| ETXM483 | ETXS966 | ETXS965 |
| ETXM484 | ETXS968 | ETXS967 |
| ETXM485 | ETXS970 | ETXS969 |
| ETXM486 | ETXS972 | ETXS971 |
| ETXM487 | ETXS974 | ETXS973 |
| ETXM488 | ETXS976 | ETXS975 |
| ETXM489 | ETXS978 | ETXS977 |
| ETXM490 | ETXS980 | ETXS979 |
| ETXM491 | ETXS982 | ETXS981 |
| ETXM492 | ETXS984 | ETXS983 |
| ETXM493 | ETXS986 | ETXS985 |
| ETXM494 | ETXS988 | ETXS987 |
| ETXM495 | ETXS990 | ETXS989 |
| ETXM496 | ETXS992 | ETXS991 |
| ETXM497 | ETXS994 | ETXS993 |
| ETXM498 | ETXS996 | ETXS995 |
| ETXM499 | ETXS998 | ETXS997 |
| ETXM500 | ETXS1000 | ETXS999 |
| ETXM501 | ETXS1002 | ETXS1001 |
| ETXM502 | ETXS1004 | ETXS1003 |
| ETXM503 | ETXS1006 | ETXS1005 |
| ETXM504 | ETXS1008 | ETXS1007 |
| ETXM505 | ETXS1010 | ETXS1009 |
| ETXM506 | ETXS1012 | ETXS1011 |
| ETXM507 | ETXS1014 | ETXS1013 |
| ETXM508 | ETXS1016 | ETXS1015 |
| ETXM509 | ETXS1018 | ETXS1017 |
| ETXM510 | ETXS1020 | ETXS1019 |
| ETXM511 | ETXS1022 | ETXS1021 |
| ETXM512 | ETXS1024 | ETXS1023 |
| ETXM513 | ETXS1026 | ETXS1025 |
| ETXM514 | ETXS1028 | ETXS1027 |
| ETXM515 | ETXS1030 | ETXS1029 |
| ETXM1184 | ETXS1036 | ETXS1035 |
| ETXM1199 | ETXS2398 | ETXS2397 |
| ETXM1157 | ETXS1040 | ETXS1039 |
| ETXM1208 | ETXS2416 | ETXS2399 |
| ETXM1176 | ETXS636 | ETXS635 |
| ETXM1217 | ETXS2434 | ETXS2433 |
| ETXM1136 | ETXS644 | ETXS643 |
| ETXM1226 | ETXS2452 | ETXS2435 |
| ETXM1200 | ETXS2400 | ETXS2399 |
| ETXM1201 | ETXS2402 | ETXS2401 |
| ETXM1203 | ETXS2406 | ETXS2405 |
| ETXM1204 | ETXS2408 | ETXS2407 |

[1578] For duplexes of Table 5, these can have a duplex structure according to FIG. 8a with a 2 nucleoside overhang at the 3′ end of the antisense; or a duplex structure according to FIG. 8b, namely a 19 mer blunt ended construct.

[1579] Definitions as provided in the above Tables:
[1580] A—adenosine
[1581] C—cytidine
[1582] G—guanosine
[1583] T—thymidine
[1584] m—2′-O-methyl
[1585] f—2′fluro
[1586] s—phosphorothioate bond
[1587] ia—inverted abasic nucleoside

### Example 9: Inhibition Screen for HCII and ZPI Expression in Human Huh7 Cells

[1588] HCII: Huh7 cells (human hepatocyte-derived cell line, obtained from JCRB Cell Bank) were maintained in Dulbecco's Modified Eagle Medium (DMEM) supplemented with 10% FBS at 37° C. in at atmosphere of 5% CO2. Cells were transfected with siRNA duplexes targeting HCII mRNA or a negative control siRNA (siRNA-control; sense strand 5′-UUCUCCGAACGUGUCACGUTT-3′ (SEQ ID NO:487), antisense strand 5′-ACGUGACACGUUCGGAGAATT-3′ (SEQ ID NO:486)) at a final duplex concentration of 5 nM and 0.1 nM. Transfection was carried out by adding 9.7 μL Opti-MEM (ThermoFisher) plus 0.3 μL Lipofectamine RNAiMAX (ThermoFisher) to 10 μL of each siRNA duplex. The mixture was incubated at room temperature for 15 minutes before being added to 100 μL of complete growth medium containing 20,000 Huh7 cells. Cells were incubated for 24 hours at 37° C./5% CO2 prior to total RNA purification using a RNeasy 96 Kit (Qiagen). Each duplex was tested by transfection in duplicate wells in two independent experiments.

[1589] cDNA synthesis was performed using FastQuant RT (with gDNase) Kit (Tiangen). Real-time quantitative PCR (qPCR) was performed on an ABI Prism 7900HT or ABI QuantStudio 7 with primers specific for human HCII (Hs00164821_ml) and human GAPDH (Hs02786624_g1) using FastStart Universal Probe Master Kit (Roche).

[1590] qPCR was performed in duplicate on cDNA derived from each well and the mean Ct calculated. Relative HCII expression was calculated from mean Ct values using the comparative Ct (ΔΔCt) method, normalised to GAPDH and relative to untreated cells. Based on the results of primary screen, siRNA duplexes displaying good activity were selected for dose-response follow-up. Results are shown in FIG. 9. Sequences of RNAi molecules are depicted herein.

[1591] ZPI: Huh7 cells (human hepatocyte-derived cell line, obtained from JCRB Cell Bank) were maintained in Dulbecco's Modified Eagle Medium (DMEM) supplemented with 10% FBS at 37° C. in at atmosphere of 5% CO2. Cells were transfected with siRNA duplexes targeting ZPI mRNA or a negative control siRNA (siRNA-control; sense strand 5′-UUCUCCGAACGUGUCACGUTT-3′ (SEQ ID NO:487), antisense strand 5′-ACGUGACACGUUCGGAGAATT-3′ (SEQ ID NO:486)) at a final duplex concentration of 10 nM and 0.1 nM. Transfection was carried out by adding 9.7 μL Opti-MEM (ThermoFisher) plus 0.3 μL Lipofectamine RNAiMAX (ThermoFisher) to 10 μL of each siRNA duplex. The mixture was incubated at room temperature for 15 minutes before being added to 100 μL of complete growth medium containing 20,000 Huh7 cells. Cells were incubated for 24 hours at 37° C./5% CO2 prior to total RNA purification using a RNeasy 96 Kit (Qiagen). Each duplex was tested by transfection in duplicate wells in two independent experiments.

[1592] cDNA synthesis was performed using FastQuant RT (with gDNase) Kit (Tiangen). Real-time quantitative PCR (qPCR) was performed on an ABI Prism 7900HT or ABI QuantStudio 7 with primers specific for human ZPI (Hs01547819_ml) and human GAPDH (Hs02786624_g1) using FastStart Universal Probe Master Kit (Roche).

[1593] qPCR was performed in duplicate on cDNA derived from each well and the mean Ct calculated. Relative ZPI expression was calculated from mean Ct values using the comparative Ct (ΔΔCt) method, normalised to GAPDH and relative to untreated cells. Based on the results of primary screen, siRNA duplexes displaying good activity were selected for dose-response follow-up. Results are shown in FIG. 9. Sequences of RNAi molecules are depicted herein.

### Example 10: Dose-Response for Inhibition of HCII Expression in Human Huh7 Cells

[1594] Huh7 cells (human hepatocyte-derived cell line, obtained from JCRB Cell Bank) were maintained in Dulbecco's Modified Eagle Medium (DMEM) supplemented with 10% FBS at 37° C. in at atmosphere of 5% CO2. Cells were transfected with siRNA duplexes targeting HCII mRNA or a negative control siRNA (siRNA-control; sense strand 5′-UUCUCCGAACGUGUCACGUTT-3′ (SEQ ID NO:487), antisense strand 5′-ACGUGACACGUUCGGAGAATT-3′ (SEQ ID NO:486)) using 10×3-fold serial dilutions over a final duplex concentration range of 20 nM to 1 μM. Transfection was carried out by adding 9.7 μL Opti-MEM (ThermoFisher) plus 0.3 μL Lipofectamine RNAiMAX (ThermoFisher) to 10 μL of each siRNA duplex. The mixture was incubated at room temperature for 15 minutes before being added to 100 μL of complete growth medium containing 20,000 Huh7 cells. Cells were incubated for 24 hours at 37° C./5% CO2 prior to total RNA purification using a RNeasy 96 Kit (Qiagen). Each duplex was tested by transfection in duplicate wells in a single experiment.

[1595] cDNA synthesis was performed using FastQuant RT (with gDNase) Kit (Tiangen). Real-time quantitative PCR (qPCR) was performed on an ABI Prism 7900HT or ABI QuantStudio 7 with primers specific for human HCII (Hs00164821_ml) and human GAPDH (Hs02786624_g1) using FastStart Universal Probe Master Kit (Roche).

[1596] qPCR was performed in duplicate on cDNA derived from each well and the mean Ct calculated. Relative HCII expression was calculated from mean Ct values using the comparative Ct (ΔΔCt) method, normalised to GAPDH and relative to untreated cells. Maximum percent inhibition of HCII expression and IC50 values were calculated using a four parameter (variable slope) model using GraphPad Prism 9. Results are shown in FIG. 9. Sequences of RNAi molecules are depicted in the relevant Tables herein.

### Example 11: Dose-Response for Inhibition of ZPI Expression in Human Huh7 Cells

[1597] Huh7 cells (human hepatocyte-derived cell line, obtained from JCRB Cell Bank) were maintained in Dulbecco's Modified Eagle Medium (DMEM) supplemented with 10% FBS at 37° C. in at atmosphere of 5% CO2. Cells were transfected with siRNA duplexes targeting ZPI mRNA or a negative control siRNA (siRNA-control; sense strand 5′-UUCUCCGAACGUGUCACGUTT-3′ (SEQ ID NO:487), antisense strand 5′-ACGUGACACGUUCGGAGAATT-3′ (SEQ ID NO:486)) using 10×3-fold serial dilutions over a final duplex concentration range of 20 nM to 1 μM. Transfection was carried out by adding 9.7 μL Opti-MEM (ThermoFisher) plus 0.3 μL Lipofectamine RNAiMAX (ThermoFisher) to 10 μL of each siRNA duplex. The mixture was incubated at room temperature for 15 minutes before being added to 100 μL of complete growth medium containing 20,000 Huh7 cells. Cells were incubated for 24 hours at 37° C./5% CO2 prior to total RNA purification using a RNeasy 96 Kit (Qiagen). Each duplex was tested by transfection in duplicate wells in a single experiment.

[1598] cDNA synthesis was performed using FastQuant RT (with gDNase) Kit (Tiangen). Real-time quantitative PCR (qPCR) was performed on an ABI Prism 7900HT or ABI QuantStudio 7 with primers specific for human ZPI (Hs01547819_ml) and human GAPDH (Hs02786624_g1) using FastStart Universal Probe Master Kit (Roche).

[1599] qPCR was performed in duplicate on cDNA derived from each well and the mean Ct calculated. Relative ZPI expression was calculated from mean Ct values using the comparative Ct (ΔΔCt) method, normalised to GAPDH and relative to untreated cells. Maximum percent inhibition of ZPI expression and IC50 values were calculated using a four parameter (variable slope) model using GraphPad Prism 9. Results are shown in FIG. 9. Sequences of RNAi molecules are depicted in the relevant Tables herein.

TABLE 6
Relative mRNA Expression

| | | | | | | |
|---|---|---|---|---|---|---|
| | | | | | Mean | Mean |
| | | | | | Relative | Relative |
| | Antisense | SEQ ID NO (AS - | Sense strand | SEQ ID NO (SS - | Expression/0.1 | Expression/1 |
| Duplex ID | strand ID | mod) | ID | mod) | nM | nM |

HCII:

| | | | | | | |
|---|---|---|---|---|---|---|
| ETXM236 | ETXS472 | SEQ ID NO: 123 | ETXS471 | SEQ ID NO: 283 | 0.81 | 0.3 |
| ETXM237 | ETXS474 | SEQ ID NO: 124 | ETXS473 | SEQ ID NO: 284 | 0.92 | 0.37 |
| ETXM238 | ETXS476 | SEQ ID NO: 125 | ETXS475 | SEQ ID NO: 285 | 0.67 | 0.24 |
| ETXM239 | ETXS478 | SEQ ID NO: 126 | ETXS477 | SEQ ID NO: 286 | 1.09 | 0.77 |
| ETXM240 | ETXS480 | SEQ ID NO: 127 | ETXS479 | SEQ ID NO: 287 | 0.93 | 0.58 |
| ETXM241 | ETXS482 | SEQ ID NO: 128 | ETXS481 | SEQ ID NO: 288 | 1.12 | 0.91 |
| ETXM242 | ETXS484 | SEQ ID NO: 129 | ETXS483 | SEQ ID NO: 289 | 1.1 | 1.03 |
| ETXM243 | ETXS486 | SEQ ID NO: 130 | ETXS485 | SEQ ID NO: 290 | 1.09 | 0.89 |
| ETXM244 | ETXS488 | SEQ ID NO: 131 | ETXS487 | SEQ ID NO: 291 | 0.91 | 0.48 |
| ETXM245 | ETXS490 | SEQ ID NO: 132 | ETXS489 | SEQ ID NO: 292 | 0.93 | 0.56 |
| ETXM246 | ETXS492 | SEQ ID NO: 133 | ETXS491 | SEQ ID NO: 293 | 0.69 | 0.34 |
| ETXM247 | ETXS494 | SEQ ID NO: 134 | ETXS493 | SEQ ID NO: 294 | 0.93 | 0.7 |
| ETXM248 | ETXS496 | SEQ ID NO: 135 | ETXS495 | SEQ ID NO: 295 | 0.8 | 0.44 |
| ETXM249 | ETXS498 | SEQ ID NO: 136 | ETXS497 | SEQ ID NO: 296 | 0.84 | 0.44 |
| ETXM250 | ETXS500 | SEQ ID NO: 137 | ETXS499 | SEQ ID NO: 297 | 0.81 | 0.39 |
| ETXM251 | ETXS502 | SEQ ID NO: 138 | ETXS501 | SEQ ID NO: 298 | 0.67 | 0.41 |
| ETXM252 | ETXS504 | SEQ ID NO: 139 | ETXS503 | SEQ ID NO: 299 | 0.51 | 0.34 |
| ETXM253 | ETXS506 | SEQ ID NO: 140 | ETXS505 | SEQ ID NO: 300 | 0.57 | 0.37 |
| ETXM254 | ETXS508 | SEQ ID NO: 141 | ETXS507 | SEQ ID NO: 301 | 0.65 | 0.43 |
| ETXM255 | ETXS510 | SEQ ID NO: 142 | ETXS509 | SEQ ID NO: 302 | 0.73 | 0.65 |
| ETXM256 | ETXS512 | SEQ ID NO: 143 | ETXS511 | SEQ ID NO: 303 | 0.77 | 0.36 |
| ETXM257 | ETXS514 | SEQ ID NO: 144 | ETXS513 | SEQ ID NO: 304 | 0.92 | 0.43 |
| ETXM258 | ETXS516 | SEQ ID NO: 145 | ETXS515 | SEQ ID NO: 305 | 0.62 | 0.24 |
| ETXM259 | ETXS518 | SEQ ID NO: 146 | ETXS517 | SEQ ID NO: 306 | 0.96 | 0.58 |
| ETXM260 | ETXS520 | SEQ ID NO: 147 | ETXS519 | SEQ ID NO: 307 | 0.86 | 0.54 |
| ETXM261 | ETXS522 | SEQ ID NO: 148 | ETXS521 | SEQ ID NO: 308 | 0.92 | 0.67 |
| ETXM262 | ETXS524 | SEQ ID NO: 149 | ETXS523 | SEQ ID NO: 309 | 0.89 | 0.73 |
| ETXM263 | ETXS526 | SEQ ID NO: 150 | ETXS525 | SEQ ID NO: 310 | 0.76 | 0.59 |
| ETXM264 | ETXS528 | SEQ ID NO: 151 | ETXS527 | SEQ ID NO: 311 | 0.78 | 0.42 |
| ETXM265 | ETXS530 | SEQ ID NO: 152 | ETXS529 | SEQ ID NO: 312 | 0.74 | 0.52 |
| ETXM266 | ETXS532 | SEQ ID NO: 153 | ETXS531 | SEQ ID NO: 313 | 0.79 | 0.32 |
| ETXM267 | ETXS534 | SEQ ID NO: 154 | ETXS533 | SEQ ID NO: 314 | 0.98 | 0.51 |
| ETXM268 | ETXS536 | SEQ ID NO: 155 | ETXS535 | SEQ ID NO: 315 | 0.92 | 0.39 |
| ETXM269 | ETXS538 | SEQ ID NO: 156 | ETXS537 | SEQ ID NO: 316 | 0.78 | 0.34 |
| ETXM270 | ETXS540 | SEQ ID NO: 157 | ETXS539 | SEQ ID NO: 317 | 0.82 | 0.51 |
| ETXM271 | ETXS542 | SEQ ID NO: 158 | ETXS541 | SEQ ID NO: 318 | 0.7 | 0.39 |
| ETXM272 | ETXS544 | SEQ ID NO: 159 | ETXS543 | SEQ ID NO: 319 | 0.56 | 0.22 |
| ETXM273 | ETXS546 | SEQ ID NO: 160 | ETXS545 | SEQ ID NO: 320 | 0.58 | 0.27 |
| ETXM274 | ETXS548 | SEQ ID NO: 161 | ETXS547 | SEQ ID NO: 321 | 0.71 | 0.34 |
| ETXM275 | ETXS550 | SEQ ID NO: 162 | ETXS549 | SEQ ID NO: 322 | 0.78 | 0.51 |
| ETXM276 | ETXS552 | SEQ ID NO: 163 | ETXS551 | SEQ ID NO: 323 | 0.93 | 0.43 |
| ETXM277 | ETXS554 | SEQ ID NO: 164 | ETXS553 | SEQ ID NO: 324 | 1.12 | 0.76 |
| ETXM278 | ETXS556 | SEQ ID NO: 165 | ETXS555 | SEQ ID NO: 325 | 0.75 | 0.35 |
| ETXM279 | ETXS558 | SEQ ID NO: 166 | ETXS557 | SEQ ID NO: 326 | 1.02 | 1.01 |
| ETXM280 | ETXS560 | SEQ ID NO: 167 | ETXS559 | SEQ ID NO: 327 | 1.01 | 0.9 |
| ETXM281 | ETXS562 | SEQ ID NO: 168 | ETXS561 | SEQ ID NO: 328 | 1.2 | 0.98 |
| ETXM282 | ETXS564 | SEQ ID NO: 169 | ETXS563 | SEQ ID NO: 329 | 1.23 | 0.98 |
| ETXM283 | ETXS566 | SEQ ID NO: 170 | ETXS565 | SEQ ID NO: 330 | 1.22 | 0.91 |
| ETXM284 | ETXS568 | SEQ ID NO: 171 | ETXS567 | SEQ ID NO: 331 | 0.97 | 0.45 |
| ETXM285 | ETXS570 | SEQ ID NO: 172 | ETXS569 | SEQ ID NO: 332 | 1.34 | 0.94 |
| ETXM286 | ETXS572 | SEQ ID NO: 173 | ETXS571 | SEQ ID NO: 333 | 0.88 | 0.48 |
| ETXM287 | ETXS574 | SEQ ID NO: 174 | ETXS573 | SEQ ID NO: 334 | 0.84 | 0.64 |
| ETXM288 | ETXS576 | SEQ ID NO: 175 | ETXS575 | SEQ ID NO: 335 | 0.85 | 0.43 |
| ETXM289 | ETXS578 | SEQ ID NO: 176 | ETXS577 | SEQ ID NO: 336 | 0.76 | 0.42 |
| ETXM290 | ETXS580 | SEQ ID NO: 177 | ETXS579 | SEQ ID NO: 337 | 0.81 | 0.45 |
| ETXM291 | ETXS582 | SEQ ID NO: 178 | ETXS581 | SEQ ID NO: 338 | 0.81 | 0.4 |
| ETXM292 | ETXS584 | SEQ ID NO: 179 | ETXS583 | SEQ ID NO: 339 | 0.48 | 0.28 |
| ETXM293 | ETXS586 | SEQ ID NO: 180 | ETXS585 | SEQ ID NO: 340 | 0.56 | 0.25 |
| ETXM294 | ETXS588 | SEQ ID NO: 181 | ETXS587 | SEQ ID NO: 341 | 0.62 | 0.32 |
| ETXM295 | ETXS590 | SEQ ID NO: 182 | ETXS589 | SEQ ID NO: 342 | 1 | 0.67 |
| ETXM296 | ETXS592 | SEQ ID NO: 183 | ETXS591 | SEQ ID NO: 343 | 0.71 | 0.5 |
| ETXM297 | ETXS594 | SEQ ID NO: 184 | ETXS593 | SEQ ID NO: 344 | 0.74 | 0.46 |
| ETXM298 | ETXS596 | SEQ ID NO: 185 | ETXS595 | SEQ ID NO: 345 | 0.65 | 0.29 |
| ETXM299 | ETXS598 | SEQ ID NO: 186 | ETXS597 | SEQ ID NO: 346 | 0.82 | 0.65 |
| ETXM300 | ETXS600 | SEQ ID NO: 187 | ETXS599 | SEQ ID NO: 347 | 0.81 | 0.6 |
| ETXM301 | ETXS602 | SEQ ID NO: 188 | ETXS601 | SEQ ID NO: 348 | 0.97 | 0.94 |
| ETXM302 | ETXS604 | SEQ ID NO: 189 | ETXS603 | SEQ ID NO: 349 | 1.13 | 0.85 |
| ETXM303 | ETXS606 | SEQ ID NO: 190 | ETXS605 | SEQ ID NO: 350 | 1.08 | 0.69 |
| ETXM304 | ETXS608 | SEQ ID NO: 191 | ETXS607 | SEQ ID NO: 351 | 0.99 | 0.41 |
| ETXM305 | ETXS610 | SEQ ID NO: 192 | ETXS609 | SEQ ID NO: 352 | 1.14 | 0.78 |
| ETXM306 | ETXS612 | SEQ ID NO: 193 | ETXS611 | SEQ ID NO: 353 | 0.74 | 0.43 |
| ETXM307 | ETXS614 | SEQ ID NO: 194 | ETXS613 | SEQ ID NO: 354 | 0.81 | 0.53 |
| ETXM308 | ETXS616 | SEQ ID NO: 195 | ETXS615 | SEQ ID NO: 355 | 0.68 | 0.36 |
| ETXM309 | ETXS618 | SEQ ID NO: 196 | ETXS617 | SEQ ID NO: 356 | 0.63 | 0.26 |
| ETXM310 | ETXS620 | SEQ ID NO: 197 | ETXS619 | SEQ ID NO: 357 | 0.76 | 0.43 |
| ETXM311 | ETXS622 | SEQ ID NO: 198 | ETXS621 | SEQ ID NO: 358 | 0.71 | 0.36 |
| ETXM312 | ETXS624 | SEQ ID NO: 199 | ETXS623 | SEQ ID NO: 359 | 0.62 | 0.25 |
| ETXM313 | ETXS626 | SEQ ID NO: 200 | ETXS625 | SEQ ID NO: 360 | 0.79 | 0.31 |
| ETXM314 | ETXS628 | SEQ ID NO: 201 | ETXS627 | SEQ ID NO: 361 | 0.65 | 0.25 |
| ETXM315 | ETXS630 | SEQ ID NO: 202 | ETXS629 | SEQ ID NO: 362 | 0.96 | 0.66 |

ZPI:

| | | | | | | |
|---|---|---|---|---|---|---|
| ETXM436 | ETXS872 | SEQ ID NO: 203 | ETXS871 | SEQ ID NO: 363 | 0.72 | 0.44 |
| ETXM437 | ETXS874 | SEQ ID NO: 204 | ETXS873 | SEQ ID NO: 364 | 0.98 | 0.47 |
| ETXM438 | ETXS876 | SEQ ID NO: 205 | ETXS875 | SEQ ID NO: 365 | 1.05 | 0.75 |
| ETXM439 | ETXS878 | SEQ ID NO: 206 | ETXS877 | SEQ ID NO: 366 | 0.91 | 0.49 |
| ETXM440 | ETXS880 | SEQ ID NO: 207 | ETXS879 | SEQ ID NO: 367 | 0.91 | 0.46 |
| ETXM441 | ETXS882 | SEQ ID NO: 208 | ETXS881 | SEQ ID NO: 368 | 0.74 | 0.36 |
| ETXM442 | ETXS884 | SEQ ID NO: 209 | ETXS883 | SEQ ID NO: 369 | 0.62 | 0.36 |
| ETXM443 | ETXS886 | SEQ ID NO: 210 | ETXS885 | SEQ ID NO: 370 | 0.73 | 0.3 |
| ETXM444 | ETXS888 | SEQ ID NO: 211 | ETXS887 | SEQ ID NO: 371 | 1 | 0.59 |
| ETXM445 | ETXS890 | SEQ ID NO: 212 | ETXS889 | SEQ ID NO: 372 | 0.71 | 0.37 |
| ETXM446 | ETXS892 | SEQ ID NO: 213 | ETXS891 | SEQ ID NO: 373 | 0.73 | 0.27 |
| ETXM447 | ETXS894 | SEQ ID NO: 214 | ETXS893 | SEQ ID NO: 374 | 0.81 | 0.39 |
| ETXM448 | ETXS896 | SEQ ID NO: 215 | ETXS895 | SEQ ID NO: 375 | 0.81 | 0.61 |
| ETXM449 | ETXS898 | SEQ ID NO: 216 | ETXS897 | SEQ ID NO: 376 | 0.91 | 0.8 |
| ETXM450 | ETXS900 | SEQ ID NO: 217 | ETXS899 | SEQ ID NO: 377 | 0.97 | 0.52 |
| ETXM451 | ETXS902 | SEQ ID NO: 218 | ETXS901 | SEQ ID NO: 378 | 0.96 | 0.61 |
| ETXM452 | ETXS904 | SEQ ID NO: 219 | ETXS903 | SEQ ID NO: 379 | 0.4 | 0.24 |
| ETXM453 | ETXS906 | SEQ ID NO: 220 | ETXS905 | SEQ ID NO: 380 | 0.62 | 0.3 |
| ETXM454 | ETXS908 | SEQ ID NO: 221 | ETXS907 | SEQ ID NO: 381 | 0.81 | 0.46 |
| ETXM455 | ETXS910 | SEQ ID NO: 222 | ETXS909 | SEQ ID NO: 382 | 0.94 | 0.68 |
| ETXM456 | ETXS912 | SEQ ID NO: 223 | ETXS911 | SEQ ID NO: 383 | 0.75 | 0.36 |
| ETXM457 | ETXS914 | SEQ ID NO: 224 | ETXS913 | SEQ ID NO: 384 | 0.98 | 0.52 |
| ETXM458 | ETXS916 | SEQ ID NO: 225 | ETXS915 | SEQ ID NO: 385 | 1 | 0.61 |
| ETXM459 | ETXS918 | SEQ ID NO: 226 | ETXS917 | SEQ ID NO: 386 | 0.92 | 0.44 |
| ETXM460 | ETXS920 | SEQ ID NO: 227 | ETXS919 | SEQ ID NO: 387 | 0.86 | 0.4 |
| ETXM461 | ETXS922 | SEQ ID NO: 228 | ETXS921 | SEQ ID NO: 388 | 0.84 | 0.27 |
| ETXM462 | ETXS924 | SEQ ID NO: 229 | ETXS923 | SEQ ID NO: 389 | 0.72 | 0.33 |
| ETXM463 | ETXS926 | SEQ ID NO: 230 | ETXS925 | SEQ ID NO: 390 | 0.76 | 0.35 |
| ETXM464 | ETXS928 | SEQ ID NO: 231 | ETXS927 | SEQ ID NO: 391 | 0.95 | 0.55 |
| ETXM465 | ETXS930 | SEQ ID NO: 232 | ETXS929 | SEQ ID NO: 392 | 0.77 | 0.36 |
| ETXM466 | ETXS932 | SEQ ID NO: 233 | ETXS931 | SEQ ID NO: 393 | 0.84 | 0.33 |
| ETXM467 | ETXS934 | SEQ ID NO: 234 | ETXS933 | SEQ ID NO: 394 | 0.91 | 0.39 |
| ETXM468 | ETXS936 | SEQ ID NO: 235 | ETXS935 | SEQ ID NO: 395 | 1.14 | 0.8 |
| ETXM469 | ETXS938 | SEQ ID NO: 236 | ETXS937 | SEQ ID NO: 396 | 1.17 | 0.67 |
| ETXM470 | ETXS940 | SEQ ID NO: 237 | ETXS939 | SEQ ID NO: 397 | 1.12 | 0.79 |
| ETXM471 | ETXS942 | SEQ ID NO: 238 | ETXS941 | SEQ ID NO: 398 | 1.16 | 0.86 |
| ETXM472 | ETXS944 | SEQ ID NO: 239 | ETXS943 | SEQ ID NO: 399 | 0.49 | 0.25 |
| ETXM473 | ETXS946 | SEQ ID NO: 240 | ETXS945 | SEQ ID NO: 400 | 0.91 | 0.34 |
| ETXM474 | ETXS948 | SEQ ID NO: 241 | ETXS947 | SEQ ID NO: 401 | 1.12 | 0.68 |
| ETXM475 | ETXS950 | SEQ ID NO: 242 | ETXS949 | SEQ ID NO: 402 | 1.25 | 0.84 |
| ETXM476 | ETXS952 | SEQ ID NO: 243 | ETXS951 | SEQ ID NO: 403 | 0.87 | 0.42 |
| ETXM477 | ETXS954 | SEQ ID NO: 244 | ETXS953 | SEQ ID NO: 404 | 1.12 | 0.52 |
| ETXM478 | ETXS956 | SEQ ID NO: 245 | ETXS955 | SEQ ID NO: 405 | 1.03 | 0.62 |
| ETXM479 | ETXS958 | SEQ ID NO: 246 | ETXS957 | SEQ ID NO: 406 | 1.13 | 0.51 |
| ETXM480 | ETXS960 | SEQ ID NO: 247 | ETXS959 | SEQ ID NO: 407 | 0.93 | 0.56 |
| ETXM481 | ETXS962 | SEQ ID NO: 248 | ETXS961 | SEQ ID NO: 408 | 0.89 | 0.36 |
| ETXM482 | ETXS964 | SEQ ID NO: 249 | ETXS963 | SEQ ID NO: 409 | 0.68 | 0.46 |
| ETXM483 | ETXS966 | SEQ ID NO: 250 | ETXS965 | SEQ ID NO: 410 | 0.82 | 0.5 |
| ETXM484 | ETXS968 | SEQ ID NO: 251 | ETXS967 | SEQ ID NO: 411 | 1.06 | 0.74 |
| ETXM485 | ETXS970 | SEQ ID NO: 252 | ETXS969 | SEQ ID NO: 412 | 0.91 | 0.41 |
| ETXM486 | ETXS972 | SEQ ID NO: 253 | ETXS971 | SEQ ID NO: 413 | 0.68 | 0.23 |
| ETXM487 | ETXS974 | SEQ ID NO: 254 | ETXS973 | SEQ ID NO: 414 | 0.8 | 0.31 |
| ETXM488 | ETXS976 | SEQ ID NO: 255 | ETXS975 | SEQ ID NO: 415 | 0.89 | 0.64 |
| ETXM489 | ETXS978 | SEQ ID NO: 256 | ETXS977 | SEQ ID NO: 416 | 0.89 | 0.67 |
| ETXM490 | ETXS980 | SEQ ID NO: 257 | ETXS979 | SEQ ID NO: 417 | 0.91 | 0.56 |
| ETXM491 | ETXS982 | SEQ ID NO: 258 | ETXS981 | SEQ ID NO: 418 | 1.06 | 0.75 |
| ETXM492 | ETXS984 | SEQ ID NO: 259 | ETXS983 | SEQ ID NO: 419 | 0.43 | 0.22 |
| ETXM493 | ETXS986 | SEQ ID NO: 260 | ETXS985 | SEQ ID NO: 420 | 0.59 | 0.33 |
| ETXM494 | ETXS988 | SEQ ID NO: 261 | ETXS987 | SEQ ID NO: 421 | 0.93 | 0.59 |
| ETXM495 | ETXS990 | SEQ ID NO: 262 | ETXS989 | SEQ ID NO: 422 | 1.08 | 0.74 |
| ETXM496 | ETXS992 | SEQ ID NO: 263 | ETXS991 | SEQ ID NO: 423 | 0.73 | 0.42 |
| ETXM497 | ETXS994 | SEQ ID NO: 264 | ETXS993 | SEQ ID NO: 424 | 1.01 | 0.59 |
| ETXM498 | ETXS996 | SEQ ID NO: 265 | ETXS995 | SEQ ID NO: 425 | 0.95 | 0.59 |
| ETXM499 | ETXS998 | SEQ ID NO: 266 | ETXS997 | SEQ ID NO: 426 | 1.08 | 0.53 |
| ETXM500 | ETXS1000 | SEQ ID NO: 267 | ETXS999 | SEQ ID NO: 427 | 0.87 | 0.46 |
| ETXM501 | ETXS1002 | SEQ ID NO: 268 | ETXS1001 | SEQ ID NO: 428 | 0.6 | 0.27 |
| ETXM502 | ETXS1004 | SEQ ID NO: 269 | ETXS1003 | SEQ ID NO: 429 | 0.6 | 0.28 |
| ETXM503 | ETXS1006 | SEQ ID NO: 270 | ETXS1005 | SEQ ID NO: 430 | 0.73 | 0.36 |
| ETXM504 | ETXS1008 | SEQ ID NO: 271 | ETXS1007 | SEQ ID NO: 431 | 0.9 | 0.68 |
| ETXM505 | ETXS1010 | SEQ ID NO: 272 | ETXS1009 | SEQ ID NO: 432 | 0.72 | 0.36 |
| ETXM506 | ETXS1012 | SEQ ID NO: 273 | ETXS1011 | SEQ ID NO: 433 | 0.62 | 0.25 |
| ETXM507 | ETXS1014 | SEQ ID NO: 274 | ETXS1013 | SEQ ID NO: 434 | 1.21 | 0.33 |
| ETXM508 | ETXS1016 | SEQ ID NO: 275 | ETXS1015 | SEQ ID NO: 435 | 1.08 | 0.83 |
| ETXM509 | ETXS1018 | SEQ ID NO: 276 | ETXS1017 | SEQ ID NO: 436 | 1.09 | 0.85 |
| ETXM510 | ETXS1020 | SEQ ID NO: 277 | ETXS1019 | SEQ ID NO: 437 | 0.98 | 0.62 |
| ETXM511 | ETXS1022 | SEQ ID NO: 278 | ETXS1021 | SEQ ID NO: 438 | 0.81 | 0.87 |
| ETXM512 | ETXS1024 | SEQ ID NO: 279 | ETXS1023 | SEQ ID NO: 439 | 0.34 | 0.17 |
| ETXM513 | ETXS1026 | SEQ ID NO: 280 | ETXS1025 | SEQ ID NO: 440 | 0.49 | 0.22 |
| ETXM514 | ETXS1028 | SEQ ID NO: 281 | ETXS1027 | SEQ ID NO: 441 | 0.84 | 0.56 |
| ETXM515 | ETXS1030 | SEQ ID NO: 282 | ETXS1029 | SEQ ID NO: 442 | 0.93 | 0.74 |

TABLE 7
Dose-Response Data Table

| | | | | | | |
|---|---|---|---|---|---|---|
| | Antisense | SEQ ID NO (AS - | Sense strand | SEQ ID NO (SS - | | % Max |
| Duplex ID | strand ID | mod) | ID | mod) | IC₅₀ [pM] | Inhibition |

HCII:

| | | | | | | |
|---|---|---|---|---|---|---|
| ETXM253 | ETXS506 | SEQ ID NO: 140 | ETXS505 | SEQ ID NO: 300 | 294 | 82 |
| ETXM258 | ETXS516 | SEQ ID NO: 145 | ETXS515 | SEQ ID NO: 305 | 212 | 89 |
| ETXM272 | ETXS544 | SEQ ID NO: 159 | ETXS543 | SEQ ID NO: 319 | 348 | 84 |
| ETXM273 | ETXS546 | SEQ ID NO: 160 | ETXS545 | SEQ ID NO: 320 | 320 | 86 |
| ETXM293 | ETXS586 | SEQ ID NO: 180 | ETXS585 | SEQ ID NO: 340 | 213 | 73 |
| ETXM309 | ETXS618 | SEQ ID NO: 196 | ETXS617 | SEQ ID NO: 356 | 253 | 72 |
| ETXM313 | ETXS626 | SEQ ID NO: 200 | ETXS625 | SEQ ID NO: 360 | 327 | 84 |
| ETXM314 | ETXS628 | SEQ ID NO: 201 | ETXS627 | SEQ ID NO: 361 | 214 | 81 |

ZPI:

| | | | | | | |
|---|---|---|---|---|---|---|
| ETXM452 | ETXS904 | SEQ ID NO: 219 | ETXS903 | SEQ ID NO: 379 | 82 | 78 |
| ETXM472 | ETXS944 | SEQ ID NO: 239 | ETXS943 | SEQ ID NO: 399 | 130 | 77 |
| ETXM492 | ETXS984 | SEQ ID NO: 259 | ETXS983 | SEQ ID NO: 419 | 47 | 84 |
| ETXM500 | ETXS1000 | SEQ ID NO: 267 | ETXS999 | SEQ ID NO: 427 | 607 | 70 |
| ETXM501 | ETXS1002 | SEQ ID NO: 268 | ETXS1001 | SEQ ID NO: 428 | 190 | 74 |
| ETXM502 | ETXS1004 | SEQ ID NO: 269 | ETXS1003 | SEQ ID NO: 429 | 132 | 76 |
| ETXM503 | ETXS1006 | SEQ ID NO: 270 | ETXS1005 | SEQ ID NO: 430 | 322 | 75 |
| ETXM505 | ETXS1010 | SEQ ID NO: 272 | ETXS1009 | SEQ ID NO: 432 | 199 | 72 |
| ETXM506 | ETXS1012 | SEQ ID NO: 273 | ETXS1011 | SEQ ID NO: 433 | 162 | 82 |
| ETXM512 | ETXS1024 | SEQ ID NO: 279 | ETXS1023 | SEQ ID NO: 439 | 76 | 84 |
| ETXM513 | ETXS1026 | SEQ ID NO: 280 | ETXS1025 | SEQ ID NO: 440 | 146 | 77 |

### Example 11: Dose-Response for Inhibition of ZPI and 1B4GALT1 Expression in Human Huh7 Cells

[1600] Huh7 cells (human hepatocyte-derived cell line, obtained from JCRB Cell Bank) were maintained in Dulbecco's Modified Eagle Medium (DMVEM) supplemented with 10% FBS at 37° C. in at atmosphere of 500 CO₂. Cells were transfected with siRNA duplexes designed against the target or a negative control siRNA at 0.1 nM and 1 nM. Transfection was carried out by adding 9.7 μL Opti-MVEM (ThermoFisher) plus 0.3 μL Lipofectamine RNAiMAX (ThermoFisher) to 10 μL of each siRNA duplex. The mixture was incubated at room temperature for 15 minutes before being added to 100 μL of complete growth medium containing 20,000 Huh7 cells. Cells were incubated for 24 hours at 37° C./5%0 CO₂ prior to total RNA purification using a RNeasy 96 Kit (Qiagen). Each duplex was tested by transfection in duplicate wells and the experiment was repeated three time.

[1601] cDNA synthesis was performed using FastKing RT kit (with gDNase) Kit (Tiangen).

[1602] Real-time quantitative PCR (qPCR) was performed on an ABI Prism 7900HT or ABI QuantStudio 7 with primers specific for human B4GALT1 (Hs00155245_ml), human ZPI (Hs01547819_ml) and human GAPDH (Hs02786624_g1) using a TaqMan Gene Expression Assay Kit (ThermoFisher Scientific).

[1603] qPCR was performed in duplicate on cDNA derived from each well and the mean Ct calculated. Relative target expression was calculated from mean Ct values using the comparative Ct (ΔΔCt) method, normalised to GAPDH and relative to untreated cells.

[1604] For the inhibition of ZPI, the siRNA duplexes ETXM1184 and ETXM1199 were tested (FIG. 10). For inhibition of B4GALT1, the siRNA duplexes ETXM1200, ETXM1201, ETXM 1203 and ETXM1204 were tested (FIGS. 11 and 12).

### Example 12: In vivo Efficacy data in a haemophilia mouse model

[1605] Haemarthrosis is defined as a bleeding into joint spaces that is a common feature of haemophilia. A long-term consequence of repeated haemarthrosis is the development of permanent joint disease known as haemophilic arthropathy. Around 50% of patients with haemophilia develop severe arthropathy resulting in chronic joint pain, reduced range of motion and function, and reduced quality of life. Haemophilic arthropathy is characterised by synovial hyperplasia, chronic inflammation, fibrosis, and haemosiderosis.

[1606] The model of haemarthrosis used was the induction of a knee bleed in haem A mice and the appropriate background wild-type (WT) strain, with progression of the bleed into the joint monitored up to 10 days post-injury. Identical studies were conducted twice to increase number of animals for analysis.

[1607] The objective of these repeat studies was to demonstrate that prophylactic administration of ETXM1184 could reduce haemarthrosis in Haemophilia A mice after a joint bleed injury. Fitusiran (siRNA targeting antithrombin (AT)) was used as a reference. Advate (recombinant FVIII) was used as positive control.

[1608] For that, a total of 20 Haem A mice (Bi, L., Lawler, A., Antonarakis, S. et al. Targeted disruption of the mouse factor VIII gene produces a model of haemophilia A. Nat Genet 10, 119-121 (1995). https://doi.org/10.1038/ng0595-119) and 10 WT mice were used in this study:

| | | | Dosing | Termination | |
|---|---|---|---|---|---|
| | Mouse | | time (pre- | time (post | |
| Group | strain | Treatment | injury; days) | injury; days) | N |
| 1 | WT | Vehicle | −8 | 10 | 10 |
| 2 | Haem A | Vehicle | −8 | 10 | 10 |
| 3 | Haem A | Fitusiran - 3 | −8 | 10 | 10 |
| | | mg/kg s.c | | | |
| 4 | Haem A | Fitusiran - 10 | −8 | 10 | 10 |
| | | mg/kg s.c | | | |
| 5 | Haem A | ETXM1184 - 3 | −8 | 10 | 10 |
| | | mg/kg s.c. | | | |
| 6 | Haem A | ETXM1184 - 10 | −8 | 10 | 10 |
| | | mg/kg s.c. | | | |
| 7 | Haem A | FVIII (Advate) - | 15 mins | 10 | 10 |
| | | 300 IU/kg i.v | | | |

[1609] 8 days prior to induction of knee bleed, mice were injected subcutaneously (s.c.) with the GalNAc-siRNA construct ETXM1184, fitusiran or a vehicle (0.9% saline) at a dose volume of 5 ml/kg. Advate was injected intravenously 15 minutes prior to joint bleed induction.

[1610] To induce knee bleed, mice were weighed and anaesthetised using isoflurane inhaled anaesthetic. Both legs were shaved to expose the knee joint. Mice were injected s.c. with buprenorphine at 10 ml/kg for analgesia and the diameter of both knees was measured with electronic calipers. Subsequently, both knees were wiped with 70% ethanol.

[1611] A 30 G sterile hypodermic needle was inserted into the infrapatellar ligament of one knee. The injected knee was randomised between left and right, and the injected side was recorded. Mice were removed from anaesthetic and allowed to recover in a warmed cage before being returned to the home cage.

[1612] Mice were monitored regularly for the first 6 hours and were injected subcutaneously with buprenorphine at 10 ml/kg for analgesia at 6 hours post injury. The visual bleeding score (VBS) of the injured knee was assessed at 72 hours and 10 days post-injury.

[1613] All mice were carefully inspected daily for clinical signs of excessive blood loss. Mice showing clinical signs of excessive blood loss, piloerection, withdrawing from cage mates or grimacing were killed for welfare reasons.

[1614] Mice were taken off study at 10 days post-injury.

[1615] A citrated blood sample was taken by cardiac puncture, under isoflurane anaesthesia, plasma prepared and aliquots frozen on dry ice before storing at −80° C. For that, blood was collected into 3.8% Sodium Citrate at a ratio of 1 to 9 followed by centrifugation at 7000×g for 10 minutes at 4° C. In detail, the following steps were performed:

1. Collect blood by cardiac puncture.
2. Flush the syringe and needle with sodium citrate solution (3.8%), leaving solution in the hub of the syringe (˜30 μl).
3. Following blood collection, expel sample into a 1.5 ml microcentrifuge tube and ensure sufficient sodium citrate solution (3.8%) is added to achieve a 1:9 ratio of sodium citrate:blood. Add the sodium citrate solution to the side of the tube, not directly to the sample. Mix by inverting 4-6 times. If not centrifuging sample immediately, keep in a fridge if available or alternatively on a wrapped ice block and continue to invert the collection tube regularly.
4. Centrifuge the samples as soon as possible at a spin speed of 7000×g for 10 minutes at 4° C.
5. Remove all plasma from the sample and place into a fresh microcentrifuge tube.
6. Aliquot the plasma into pre-labelled tubes (Thermo Scientific; 10775974) as follows:
[1616] 30 μl for potential TGA assay
[1617] 100 μl for potential APTT assay
[1618] All remaining for potential target protein abundance analysis.
   7. Place all aliquots on wet/dry ice immediately.
   8. Transport samples on wet/dry ice.
   9. Transfer samples to −20° C./−80° C. freezer to be stored until use.

[1619] The liver was removed and up to 3 portions of each lobe were placed in RNA later and kept at 4° C. for 24 to 72 hours. Tissue was then blotted dry, weighed and stored at −80° C. In detail, the following steps were performed:

1. Immediately after the cardiac puncture, kill the mouse by cervical dislocation.
2. Make an incision into the abdominal wall and remove the liver as quickly as possible.
3. Place the liver on a petri dish on wet ice, to minimise sample degradation.
4. Cut 3×˜50 mg pieces of liver from each of the following lobes: left lateral lobe, medial lobe, right lateral lobe and caudate lobe. Place these liver pieces immediately into pre-labelled tubes (1.5 ml microcentrifuge tubes) containing 500 μl RNAlater, and place the collection tube on wet ice.
[1620] a. Transport on wet ice and transfer to storage at 4° C.
[1621] b. After a period of 24-72 hours, blot the liver samples and weigh. Record the weights on the terminal sheet.
[1622] c. Transfer to −80° C. for long-term storage.
   5. Collect any spare liver and place into separate pre-labelled collection tubes (2 ml microcentrifuge tubes).
[1623] a. Freeze on dry ice for potential future analyses.
[1624] b. Transport samples on dry ice.
[1625] c. Transfer to −80° C. for long-term storage.
   6. Clean all dissection tools between animals to prevent any cross contamination.

[1626] The skin was removed from the legs and the knee joint measured. Legs were subsequently placed in 10% formalin before decalcification and slide preparation. In detail, the following steps were performed:

1. Following the removal of the liver, measure and record the diameter of both the injured and uninjured knee.
2. Remove the skin from both knees. Carry out a visual bleeding score and measure knee joints.
3. Dissect the legs from the top of the femur to the ankle joint and remove some excess muscle, being careful not to cause any damage to the knee and associated structures. Place the knees in pre-labelled tubes (7 ml bijou tubes) containing 10% neutral buffered formalin to be processed for histological analysis.

[1627] Both at day 3 and day 10 after induction of knee bleed, Haem A mice that received the GalNAc-siRNA construct ETXM1184 showed a reduced visual bleeding score in comparison to Haem A mice that received the vehicle (0.9% saline) (see FIG. 16A&B).

[1628] Furthermore, the knee diameter of mice that received the GalNAc-siRNA construct ETXM1184 recovered faster following the induction of knee bleed compared to mice that received the vehicle (FIG. 18 (top right)). This observation was confirmed by comparing the differences between the diameter of the injured and non-injured skinned knee diameter (FIG. 18 (bottom left)).

[1629] Comparative data between ETXM1184 and fitusiran is provided in FIGS. 13-18.

[1630] The present invention is not intended to be limited in scope to the particular disclosed embodiments, which are provided, for example, to illustrate various aspects of the invention.

[1631] Various modifications to the compositions and methods described will become apparent from the description and teachings herein. Such variations may be practiced without departing from the true scope and spirit of the disclosure and are intended to fall within the scope of the present disclosure.

[1632] In case of ambiguity between the sequences in this specification and the sequences in the attached sequence listing, the sequences provided herein are considered to be the correct sequences.

1. A nucleic acid for inhibiting expression of a target gene, comprising a duplex region that comprises:
a first strand that is at least partially complementary to a portion of RNA transcribed from the target gene, and a second strand that is at least partially complementary to the first strand,
wherein nucleosides of said second and first strands comprise a 2′ sugar modification pattern as follows (5′-3′):
Second strand (5′-3′): Me-Me-Me-Me-Me-Me-F-Me-F-F-F-F-Me-Me-Me-Me-Me-Me-Me-Me-Me,
First strand (5′-3′): Me-F-Me-F-Me-F-Me-Me-Me-Me-Me-Me-Me-F-Me-F-Me-Me-Me-Me-Me-Me-Me
or
Second strand (5′-3′): Me-Me-Me-Me-Me-Me-Me-Me-F-F-F-Me-Me-Me-Me-Me-Me-Me-Me-Me-Me,
First strand (5′-3′): Me-F-Me-Me-Me-F-Me-Me-F-Me-Me-Me-Me-F-Me-F-Me-Me-Me-Me-Me-Me-Me.

2. A nucleic acid according to claim 1, wherein nucleosides of said second and first strands comprise a 2′ sugar and bond modification pattern as follows (5′-3′):
Second strand (5′-3′): Me(s)Me(s)Me-Me-Me-Me-F-Me-F-F-F-F-Me-Me-Me-Me-Me-Me-Me-Me-Me,
First strand (5′-3′): Me(s)F(s)Me-F-Me-F-Me-Me-Me-Me-Me-Me-Me-F-Me-F-Me-Me-Me-Me-Me(s)Me(s)Me
or:
Second strand (5′-3′): Me(s)Me(s)Me-Me-Me-Me-Me-Me-F-F-F-Me-Me-Me-Me-Me-Me-Me-Me-Me-Me,
First strand (5′-3′): Me(s)F(s)Me-Me-Me-F-Me-Me-F-Me-Me-Me-Me-F-Me-F-Me-Me-Me-Me-Me(s)Me(s)Me
wherein (s) is a phosphorothioate internucleoside linkage.

3. A nucleic acid according to claim 1, wherein nucleosides of said second and first strands comprise a 2′ sugar and abasic modification pattern as follows (5′-3′):
Second strand (5′-3′): ia-ia-Me-Me-Me-Me-Me-Me-F-Me-F-F-F-F-Me-Me-Me-Me-Me-Me-Me-Me-Me,
First strand (5′-3′): Me-F-Me-F-Me-F-Me-Me-Me-Me-Me-Me-Me-F-Me-F-Me-Me-Me-Me-Me-Me-Me
or:
Second strand (5′-3′): ia-ia-Me-Me-Me-Me-Me-Me-Me-Me-F-F-F-Me Me-Me-Me-Me-Me-Me-Me-Me-Me,
First strand (5′-3′): Me-F-Me-Me-Me-F-Me-Me-F-Me-Me-Me-Me-F-Me-F-Me-Me-Me-Me-Me-Me-Me
wherein ia represents an inverted abasic nucleoside.

4. A nucleic acid according to claim 1, wherein nucleosides of said second and first strands comprise a 2′ sugar, abasic and bond modification pattern as follows (5′-3′):
Second strand (5′-3′): ia-ia-Me(s)Me(s)Me-Me-Me-Me-F-Me-F-F-F-F-Me-Me-Me-Me-Me-Me-Me-Me-Me,
First strand (5′-3′): Me(s)F(s)Me-F-Me-F-Me-Me-Me-Me-Me-Me-Me-F-Me-F-Me-Me-Me-Me-Me(s)Me(s)Me
or:
Second strand (5′-3′): ia-ia-Me(s)Me(s)Me-Me-Me-Me-Me-Me-F-F-F-Me Me-Me-Me-Me-Me-Me-Me-Me-Me,
First strand (5′-3′): Me(s)F(s)Me-Me-Me-F-Me-Me-F-Me-Me-Me-Me-F-Me-F-Me-Me-Me-Me-Me(s)Me(s)Me
wherein:
(s) is a phosphorothioate internucleoside linkage,
ia represents an inverted abasic nucleoside.

5. A nucleic acid according to any preceding claim, wherein said first strand comprises at least 17 contiguous nucleosides differing by 0 or 1 nucleosides from any one of the first strand sequences as listed in Table 2.

6. A nucleic acid according to any preceding claim, wherein said first strand comprises at least 17 contiguous nucleosides differing by 0 or 1 nucleosides from any one of the first strand sequences as listed in Table 3.

7. A nucleic acid according to claim 5 or 6, wherein the first strand comprises nucleosides 2-18 of any one of the sequences defined in claim 5 or 6.

8. A nucleic acid according to any preceding claim, wherein the second strand comprises a nucleoside sequence of at least 17 contiguous nucleosides differing by 0 or 1 nucleosides from any one of the second strand sequences as listed in Table 2, and wherein the second strand has a region of at least 85% complementarity over the 17 contiguous nucleosides to the first strand.

9. A nucleic acid according to any preceding claim, wherein the second strand comprises a nucleoside sequence of at least 17 contiguous nucleosides differing by 0 or 1 nucleosides from any one of the second strand sequences as listed in Table 4, and wherein the second strand has a region of at least 85% complementarity over the 17 contiguous nucleosides to the first strand.

10. A nucleic acid according to any preceding claim, wherein the nucleic acid is an siRNA oligonucleoside.

11. A nucleic acid according to any preceding claim, wherein the nucleic acid is conjugated directly or indirectly to one or more ligand moieties, optionally wherein said ligand moiety is present at a terminal region of the second strand, typically at the 3′ terminal region thereof.

12. A nucleic acid according to claim 11, wherein the ligand moiety comprises:
(iv) one or more N-acetyl galactosamine (GalNAc) ligands, and/or
(v) one or more N-acetyl galactosamine (GalNAc) ligand derivatives, and/or
(vi) one or more N-acetyl galactosamine (GalNAc) ligands and/or derivatives thereof,
conjugated to the nucleic acid through a linker.

13. A nucleic acid according to claim 12, wherein said one or more GalNAc ligands and/or GalNAc ligand derivatives are conjugated directly or indirectly to the 5′ or 3′ terminal region of the second strand of the nucleic acid, typically at the 3′ terminal region thereof.

14. A nucleic acid according to any one of claims 11 to 13, having the structure: [chemical structure]
wherein:
R₁ at each occurrence is independently selected from the group consisting of hydrogen, methyl and ethyl;
R₂ is selected from the group consisting of hydrogen, hydroxy, —OC₁₋₃alkyl, —C(═O)OC₁₋₃alkyl, halo and nitro;
X₁ and X₂ at each occurrence are independently selected from the group consisting of methylene, oxygen and sulfur;
m is an integer of from 1 to 6;
n is an integer of from 1 to 10;
q, r, s, t, v are independently integers from 0 to 4, with the proviso that:
(i) q and r cannot both be 0 at the same time; and
(ii) s, t and v cannot all be 0 at the same time;
Z is an oligonucleoside.

15. A nucleic acid according to any one of claims 11 to 13, having the structure: [chemical structure]
wherein:
r and s are independently an integer selected from 1 to 16; and
Z is an oligonucleoside.

16. A pharmaceutical composition comprising a nucleic acid according to any preceding claim, in combination with a pharmaceutically acceptable excipient or carrier.

17. A nucleic acid or pharmaceutical composition according to any preceding claim, for use in therapy.

18. A nucleic acid or pharmaceutical composition according to any preceding claim, for use in prevention or treatment of a disease related to a disorder of haemostasis, such as a disease related to a disorder of haemostasis, such as haemophilia.

19. A nucleic acid or pharmaceutical composition according to any preceding claim, for use in prevention or treatment of cardiovascular disease.

20. A nucleic acid or pharmaceutical composition according to any preceding claim, for use in prevention or treatment of diabetes.

The application's sequence listing, which the Patent Office published only in electronic form, follows.

SEQUENCE LISTING (487 sequences)

SEQ ID NO: 1 - DNA, 20626 bp, Homo sapiens
  misc_feature 1..20626: note = Description of origin: HCII gene
  source 1..20626: mol_type = genomic DNA
ttgcgcttctagaatgcttccctctcaatgagaacagtagctccacgtggctgggaagttcaaagtggttttgacacagaaaagaggaagtaagtggactctatctttgatttgggatcctactcctgaccctgtgaacttcttggctccctcttgaggacgttggcttgaaagtggctctgtgggttctccctgctctctgacttctccgagcctgctggccactgtcttggctgagactgctctagtctccagaaaggagatctgctcactcctaagaagtatcaaggtcaggccaggtgtggtggctcacgcctgtaatcccagcactttgggaggccaagacaggcagatcaggaggtcaggagatcgagatcagcctggctaacacggtaaaaccccatctctactaaaaatacaaaaaattagccaggcgtggtggcacacacctgtagtcccaggtactcgggaggctgaagcaggagaatcgcttgaaaccaggaggccgaggttgcagtgagccaagattgcgccactgcactgcagcctgggcgacagagcgagacgccatttcaaaaaaaaaaaaaaatcaaggtcaggggggaagtgggaagactgaaatagataaaggattctaaagagatataacagtcaaatgcgacacatgaaaccctgaccagataaaaattaaaaacccataaaatacatgtttgaagtcatagagtaatctgacttggactagacatgtgatatatgtgaggcttgtgatcttcccaggagtgatggtagcacagcacagggcagagacccgtccatggaagaaacactggtgctagtgcccagggcagaagtgagtgatgtctttaagtggatatggaaaaatattaactattctacctaggttgtgggtgtatggatatttagtattcaattattccaatttctctgtgtatgtatacatattttttttagagacagggtctcactctgtcgaccacactggagtagggggtacaatcatagctcactgtacatactcaagtgatccttctgcctcagcctcctgagcagatgggactacaggtgtgcagcatcatggcccagtttttttttttttggtagagatgggttttgctagccgggagcagtggctcatgcctgtaatcctagcactttgggaggctgaggcgggcagatcatctgaggtcaggagttcaagaccagcctgggcaacatggtaaaaccctgtctctactaaaaacacaaaaattagccaggcatgatggcaggcgcctgtaatcccagctacttgggaggctgaggcaggagaatcgcttgaacccaggaggcagaggttgcagcaagctaagattgagccactgcactccagcctgggcaacagagcaaaaactccgtctcaaaaaaaaaaaaaaaaaaagagagagagagagatcggttttgctatgttgcccaagctggacacggacacacacacacacacacacacacacacacacacacacacacacacacacacaagctggacacagagacacacacagtgacagggcaaaggttccaaaattttaaacctggtaaatctgggtacgggtatacaggagttgttctactacactattctttcaacttttttgaaagtttgaagttatttcaaaagaaaaagttttccaaactttagtgatcctcctgcctcagcctcccaaagtgctgggatgataggcatgagccaccgtgcctgacccctctgtatatttttagaatttcatgttaaaagatggaaaagtctggatgaggtagttcacgcctgtcttcccagctctttgggaggccaaggtgggaagactgcttgaagccagacgttcaagaccaacttggccaacatagtgagaccccgcttttttctaactaaaaaaatttttttccaagttggaaaaaatatctagccataagacaaaccttgaaactgcaaaagaacaatggagtatgtgtgacaggaggtactgctctacagtggggttaaagccatacacaagctgtggtggctcacgcctgtaatcccagcactttgggaggccgatgcgggcggatcatgaggttaggagttcaagaccagcctggccagcatggtgaaacccgtctctactaaaaatacaaaacattagccagacgtggtggtgggcacctgtagtcccagctactagggaggctgaggcaggagaatggcgtgaacccaggaggcggagcttgcagtgagctgagattgcgccactgcactccagcctgggcgacagagcgagactctgtctcaaaaaaaaaaaagccatacacaagctgttaccactaaatgggaaaatgactgaaaaatgtcaatgtcaagagggactgaaatcaaatttttccaatagtgggttacatgatcagaaatccaaatagacaggaaatatgttggctttatttatttatttatttatttatttatttatttagacagagtctcactctgtcacccaggctggagtacagtggcatgaactcggctcactgcaaccttcacctcccaggttcaagcgattgtcctgcctcagcctcccgagtagctgggactacagatgtgtgccaccacacccagctaatttttgtatttttagtagggacggggttttaccatgttggtcaggctggtcttgaactcctgacctcaagtgatccacccgccttggcctctcaaagtgctgggattacaggtgtgagccaccacacctggccggtactggctttaaaaataacaaaagtaatacatacacatagaaaaaggtcaaacaaagaagtacatagaatgaaaaatgaatgctgtgtcccctcccagaccatttctgtgaataaatatgtaataccatgaaatgatgaggactaacattttctgaatgccaggcaccactctatgtgctttccacacattcattaacctcatttaattttctcatttaattaatgagataaattaatgtatctcatttaattttcacaacaacctcatgcagtaggtgtaactgtcaccctcatttcagagagcagaatactgagagctggaggccaaggggcaatttcagccagggtggctggtgacgcctcggtgaaaccaagagcgaacagtgagagcagcggccacctgctggtctgcagggatggtgtcctgggcagaaagaatagcaagtgccagggctgtgctggggccgggctttgcatgtgtgagaacaagacagagaatgagggaggtgggcccacgaggagtgtgggcacagacagcagcctctgcctgtggtgccacgctgaagactcagtattgtatgtgacagatgaaggctctaagaagacagctctgacaaaagctagagtgcaaaatcagactcagacacaaccaccggtctgtgtcctgaacacaatggacctttacactctggaatttctcaaacggagcaatgcacagacacccccatgggccccttgcacacccgcagattctcctaggagtcacattctctcttcagatagactctgggtgccgacactcccaaacatgctcttgaggagcagtctctgtgataagctgatcttccagacaatccagaatattcttaaaactttttagatcataaaatttaaaacacaaattaaaaaacaaattatcataaggccgggcacagtgactcatgcctgtaatcccagcactttgcaaggctgaagcaggaggatcacttgagcccaagagttcaagaccagcctaggcaacatagtgagaccctgtctctacaaaaaagtcaaaagttagctagacatggtggtgtgcacctgtattcccagctacttgcagggctgaggtgaggaggattgcttcagctcgggaggttgaggctgcagtgagccaagatcacgccactgcactccagcctgggtaacagagtgagaccctgtctcaaaaaacacatagggccaggcgtggtggctcacgcatgtaatcccagcactttgggaggccgagacgggaggatcacttcactccaggagttcaacaccagcctggccaacatagtgaaaccccgtctctactaaaaatacaaaaaattagttggacatggtggtgtgcgcctgtaatctcagccactcaggaggctgaggcaggagaacgcttgaacttgggagacagaggttgcagtgagctgagatcgcaccactgcactccagcatgggcagcagcgcgaaactctgtctcaaaacaaacaaacaaacaaacaaacacccataaacacaaaatgtatcacagcctcagagatccccacgaatgcctaagtggccctgaatttgggaggcactgctcagtaatagtcctatctgtcccacaacagacaggagtgctgggctgcacctactggcaacaaacacagcaacccttgactgaagaaaggtccatgccacaatccccttattctgtaagccactaattttgtcctctctcctccacctttcactgaggaacgagctcttggaaggacagggacacccgcctagtagctgagccagccacatcagtcctggagagcaggtggagggcagatgctgtgatcatcccagaagagaggacacagttggaggcagatgcatggtctctactttcagctaccctcaatgcagcctggtccccagaggcctgaagagcgccttgtttatgtggtgacctcaagaggggctgctcctgcaccaaggctatgtgtgcatgctaacacagtaaccgtcatatactcaaagtgtcagctctaagaactggagatgaggagctgcaagccactctacagttatcaaaggcacagctgagggggtttgtgctgaccaagctggttgcctggtgtttggattgggacttatttactttggaaaatatgcagcaacagcccagcaccaaagttcacatcaaaatcccactgatgaccttggctgctttcatctctgaagcgccacttctcagaaacacagaggtaagttgggtttctaatgtttctgctgattataaattatttttggtgtttacggataggcaactggttcatttttctagcaaactaagaattcagaagctttctacactgttttagaagtgggaaatggtttcatttttcagtgtgcctattataaaattgtgtcagttccattgttgggagagttgacaaacttagaataggagctgtggaatagatgaaaatattgtacttatattaaattaatcgaattggataactgtcctgtgattatgtatgagaatatccttgctcttgggtattttccctgaagtattagtattaaaggttagaggggccgggtgcagtggctcacgcctgtaatcccaacactttgggaggccgaggcgggtggatcacgaggtcaggagttcaagaccagcctgaccaacatggtgaagccaagtctctactaaaaatacaaaaattagctgggcgtggtggcacgcgcctgtaatcccagctactcaggaggctgaggcaggagaatcgcttaaacccgggaggcagaggttgcagtgagcggagatcgtgccactgcactccagcctggacaacagagttagactccgtcaaaaaaaaaaaaaaaaagaagaaaaaagaaaaaatgttagaggaacaagatataggagacctactctcaaatggtctagaagaaaaaatgtgtatgtgcatgcctgtgagaacacacacgtacgtacacacacacacagataatgacagggcaaaggttccaaaattttaaacctggtaaatctcggtacgggtatacaggagttgttctactacactattctttcaacatttttggaagtttgaacttacttcaaaataaaaagttttccaaactttaggcagttacttctctcccattctgcctgctctgttgggcctggagaccatacaccaggagggatgacggtttatcaagtgttatgctctgatgcgtgactgaaaaggccaacccagctctggcaattagcaagaaagcacaatatgaagttcccaggaaaaaaaaaaagcaaaacaaacttttgaatgatttatctttaaaatatattgtttctcttcaaacagtaatctggatttaatcacaacctagtgatagtttttaaacgtcttctacaatgtttgttatactaaatagcaaaacatcaggaagatttaccttcagatctttaatttcaatccataaaagatatcagagatattttctccttcctctggtaagggaatgacgaaaactatttttggctttttatcagataatgtgggaacagggtataagaagtttccaaatataacttctgaataccgggataaaacatgcatgtctttactctgccactctatctggcctcagatacgttttcctgaatgcttatttattcaagttggtttttgttttgttctttaaccttatttttatctgagaagaaaacattttccccctttgttccttcttcttttggctttcttttttaaaatagagatgaggtcttgctatgttgctccagctggtcttgaactcctgggctcaagcgatcctcctgccttggcctcccaagatgctaagattacaggtgtgagcccctatgcctggtcttcttcttcttgatcttagccaaaaggccaagaagtgataagaggaggacacttgaagtgtagttgggcaaggagccttctaccagctgcttactttctttgttcctgacttttaaaagtgtgttgctattgatacacagtctcctgatatgtaaaatgctgggaggatgaagctaagttactcaaagtgccattcagaaactgggcccagttctatttgcagctacatacattagaaatcatttctagaggctgagcatggtaactcatacctgtaattccagcactttgggaggccaaggcaggagaattgcctgagctcaggagtttgagacctgtctgggcaacatggtaaaaccccatctttaccaaaaacacaaaaaattaactgggtttggtggcacacacctgtggtcccagctacttcaaaaggctgaggtgggagggtctcttgagcctgagaggaacaggtggcagtgaaccaatattgtgccactgcactccagcctgggtgacagagtgagaccccgccgtctcaaaataaaaataaaaagaaatcgtttctagaaactgttttcccgtgtgtaaactagtggcactgcagcctgaggcaggtgctgagatggggacctggaaaaggcaacaggcattttgagtcagaaacaatgtgactttcctgctccaaaatgtgcaattcaaaagtctttcttagttgtgactaaaacaaactttgaacttactatttcaacagtattataaggggaagacccaaggaatgggactggcactgggaaaacagctaggaagctgctctgcacggccagggagtctggaagcatcctggtactccagagcgaacaaggctgagcgcttgatgtggggcttagaggcttaaccaacttggttcgaatctagccactgccacttattagtgacagtgacgaaaggctcagtctcctgatatataaaatgttgggaggatgaaactaagttacacgaagtgccttatacagcgtgtcaggcatccaacagaggccattatcaacattaaccacactgacagcatttcaagcagagtatccgaacagttaccccatcttcaggcctactgagttcaaatatttgcttaacaagagcagccagtaactcttacctggcctcaactggcagcagatattctgggcctcaaatatctatctaataggaaatggtcacagacacaaaataagcttaacaaaaggcagtttttttttgttttttttttgttttctgttttttgagataaggactcactctatcccccaggttggagtgcagtagtggcgtgatcacggctcactgcagactcaagtgatcctcctacttcagcctctcaagtagatgggaccacaggcgtgtgccatcacaccaggctaattatttttcttttcttttttttttttttgagacggagtttcgctctttttgcccaggctggagtgcaatggtgcgatcttggctcaccacaacctctgcctcctgaattcaaacgaatctcctgcctcagcctcctaagtatctgggattacaggcatgcgccaccacgccggctaatttttttgtattttttgtagagacagggtttctccatgttggccaggctggtctcgaactcccgacctcagatgatccgcccacctcggcctcccaaagtgctgggattactgacctgagccaccgcacccagcctatttatttaatttttcacagagatgaggtcttgctatgttgcccacactggtcttgagctcctgggctcaagtgatcttcctgccttggtctcccagtgttgggattataggcgtaagccacagcgcctggccggcagttctttctggggtgattagaagttgggaccatgtattacctgtctgagtcagcattataaacacctatggtcactgtcctggcaaaacatggaatcatcaaagctcatctaaccagagtgcagttaataaccaggaagtaagcaagagaaagacaaaggatttggcagtcaaaacagatttgacaggccaagtcagatcctcctctgaacgagtcagaggaacaaataaagacaggattgccataatgcctctgtgctaaaagcttatcttgtttacttaaataaagggagtgcccctcaggtcttgagtaagagcttgctgacatcaccctcacacagactttatctcttgtttctaaccctgtgttagaagcagtaacacagaagatttagttgctcctgacagcagtgggagctattgtctaagagatacaaaggagaaaaaagtatacctgcagcaagtgatatcacctctggggctgccaccacatcacctcactacgccctgagggggtctcagcactagacaagttccaaatcttttgcaaattaaacaaccccaggtcaggcgtggtggcttatgcctgtaatcccagcactttggggggctgaggtgggtggatcacctgaggtcaggagtttgagaccagcctggccaacagagcaaaaccccatctctactaaacaaaatacaaaaattaaccaggcgtagtggtgtgcacctgtagtcccagctacttgggaggctgaggcaagagaattgcttgagtccaggaggccgaagttgcagtaagccgagatcgcgccactgcactccagcctgggtgacagagtgagactccatttcaaaaaataaaaacaacaaaagccaattacaacaacaacaacaaaaaaacaacgaattaaacaaccccaaagattgcacaaatttcaagtatctttagaatatgttttcagaaagcctggcccatggacatttttcaacagcatctccattgcaaaggtggaatggtgtgagtcacacaggcatggctgagtcccactaatgcacatcccttctaggtactctccaatcaccagccccaggtgcccactcaagcccagctcttagtgaggtttccctgactctctgggcacttccactcctaccacacagggtagagccacacccctttccgtacccccatgtgctctggcagcattattttgagagccttcgctttactgcacgtctgtcccatctgtcccctgactggtccatgagcccctggtgggaactttgtctctggtaactaaacactgtctggaggtggtggacaaggtgtctggagaaaaacaaactcctccctgggatgcctgagctcccaggattctagaaggttagttttgcaaacctttaaagaagggattttcatcaaggggcccacagatccttcattgaggtttatgagtcccacatcaaaggttgggtgtctatctacatcagattctcttaaagtccatgatcctaaaacagttaagaactaatgctgtgagggcctcttcctgggtcaaagccacagggaacctgccatgtggatgctgcagcggggtgtggatcagccaggccgcctttcactgtgttctgttttccctcccagctttagctccgccaaaatgaaacactcattaaacgcacttctcattttcctcatcataacatctgcgtggggtgggagcaaaggcccgctggatcagctagagaaaggaggggaaactgctcagtctgcagatccccagtgggagcagttaaataacaaaaacctgagcatgcctcttctccctgccgacttccacaaggaaaacaccgtcaccaacgactggattccagagggggaggaggacgacgactatctggacctggagaagatattcagtgaagacgacgactacatcgacatcgtcgacagtctgtcagtttccccgacagactctgatgtgagtgctgggaacatcctccagctttttcatggcaagagccggatccagcgtcttaacatcctcaacgccaagttcgctttcaacctctaccgagtgctgaaagaccaggtcaacactttcgataacatcttcatagcacccgttggcatttctactgcgatgggtatgatttccttaggtctgaagggagagacccatgaacaagtgcactcgattttgcattttaaagactttgttaatgccagcagcaagtatgaaatcacgaccattcataatctcttccgtaagctgactcatcgcctcttcaggaggaattttgggtacacactgcggtcagtcaatgacctttatatccagaagcagtttccaatcctgcttgacttcaaaactaaagtaagagagtattactttgctgaggcccagatagctgacttctcagaccctgccttcatatcaaaaaccaacaaccacatcatgaagctcaccaagggcctcataaaagatgctctggagaatatagaccctgctacccagatgatgattctcaactgcatctacttcaaaggtaagaggcacctttacagttctcacagcaaacccacaacatactatttttgtatgtgggtagattgaatgccaagaactgtactgtagctataatttatccaggaaaactagacacaagattgactctggaacggggacagggaaggccaagctgaagtgacagtagcatctgacacttactgagccctaactctgtgctttaacacagccttgtgaggtcatcactgttattagcatccccattttacagaggaagccaccaacacatgaagtaaaaggatgggctgggcgcggtggctcacgcctgtaatcccagcactttgggaggccgaggcaggcagatcacttgaggtcaggagttcgagatcagcctgaccaacagaccaacatggtgaaaacctggctctactaaaaatacaaaaattagctgggcctggcggtgggtgcctgtactcccagctacttgggaggctgaggcaggagaatcacttgaacctggaaggcagagattgcagtgagccgagactgtgccactgcactctagcctggacgacagagtgagactccatctcaaaaaaaaaaaaaaaagaagtaaaacgatgctccaagggcacccagttattaaggggcagagccaaagctgaacccagggaggccaaccctagcaatctgttaaattggaagaaataatacaaaaactgttttagcatttggccagcctggatttgagttttctcttttcctttcccaattatcaataagcaggaatatagacaaaaggctaaagaaatgcacctgtgaactattcagcttgagcagctgacattgacacctacaagtgcttttcaggatacttttgaactactgggcaggtgggatggagaaataaattactatttccccagcaactgttctgggctgagcacaagggcactttttaaggaggtcaccccacacccatcacacacacataggacccctggaatcctaggaataaataagcatggatttgtaaaatccaaacctctcttttcaaatatcctcacctggaccagaccagaagaaacctctactttactctctaagctgagagtgtggaaggggaaacacgaggaatggttcggcttcaggactaattgcggtgacacacaaccacttctctttgccaccaaggactaccaggtacctgcaaagggcagtacttggaggccagtgctttctgctagttagctcccgtggttttatagcagcccaggcgaaggaaggagaccccccccagctcctggcttctgttcagggaaagggggccagagcccctcctgatctgtccacacacctgctctgtgccttggctgaggcccctgcagctctacaaggcaggcattctgctggataggccaagcagggtcactctgacacccaggtttccaccccaaggcatggcacaatgctggcctcctgtgggtggaatcaaaggctgagttctaacaggcttgcggcagacacacacacagagaccacatgtacatgatgaacacacatatccttttcattacaggttattagtacaagttttggaattgagcaaacaagagtctaagcgctggtttcaccacttctcgtttgtgtgacctcagacaagtcattcaacatctctatgactcagtttccttatctttatcacagagatgacacccactctgacagggccgagggaagaaccataagcgatggcaatgcaacagagtggcacatgacaagagctcagcgaatttgagggaatgaaactgtagattacaatactagtacaatatgataaacatatgatattgttagtgacatttattttacttctactagcaaataacctatgtttaggactgactttagaacaggctggcagaagcatttttggcagcatcaaagtcctccaacctactggtctgttggagccccccaagtacaccaaagagcctctgcattagccctggctgagggttcagggacaggcagagaagtacagcagtgagccatccctgcctgcatggaggtggagaaatgatcaggcatggtcagttgacaatctcctaaacacagtaacccgtgtcataccacagtgtaaacacacgtgcaaatgcttctgcttcctttccccatcatgagaatagtcactcaatgccgggcatcacaagggatcaaatgctaggagtacccaatcattcatggatgcttctcaaaggggacgagtgtctagaagtgtaattttaatttcacttaatttcatatggaatcatctccattactaattttgttctaattttaatgtgataatcactttgtaaagcacaataaacagaggcaggctctcatgaggaagtcagaaggaaagaatcccaagagacatgggacagctccatccaaactgaaagggccgtgattcccaaaagagcaattttgtccccaaggtctgaagacacttttggttgtcacaacctggggggttggagtaagcattactggtatctagaagggggaggctggggatgttgctaaacaccctaccatgcacagggcagcccacattgccacaaactattatgtggcccaaatgtcaaaaatgctgaggttgagaaaccctgggtgaggcagactcagggagaagggaatcgagcttcactcacaggcaggcaggagctgtctggtacttcaacctccaagacacctcctgctcatctcatcctggctgctctacccaccagctagaaaccttgaacaagttacttcacttctttgtgcctctgtttcctcatatgtaaaagagggataacaaaacgcacacaacttgcatgttgctaggagcagaaatgagataatacaggaaaggtgctgagaagaatgcccggcacatggccagttctcaactactagtcacccattactattagttactcacatcttagagctaacatagacatgggcttattcctggatacacagcactgtccccatatctacagtggtgatcctaagggcaacatggcatcacccaaatgtcttgttagtcactacagaatcacagtgtgagggatgaaggccatcaagacagagctgaggctggcagggtggctcatgcctataatcccagtgctttggaaggctgaggcaggaggattgcttgaggccaagggtttgagaccagcctaggtaacatagcaagaccccatctacaattaaaaaaaaaaaaaaaaagacagaaagaaaaaatagccaggcgtggcatgtgcttgtagtccaagctactggggagggaggctgaggcaggaggattccttgagcctgggagtgtgaggctgcagtgagctatgatggcatcgccgcactccagcctgcatgacacagtgagacctggtctcaaaaaccaaataataataacagtaataaaagctggaaagagctcaaagttactcatttgacagatgtgacagatgaagaaatagaagcgagttaggtgccttaccatggtcaaacaactagttcgtatcagaccctactccagaaactattccagtccgggtaacctctcgttaacctctcttgttagaaatgcaaatttctgcccaaatcaggcctcaggaatcaagagactgtggggtcggctctgcaggctatctgaatgaggcctccagggaaatcagattcactctcaagggtgagacgatttccctaaaggaaccttctcataacagcctcttcctgtggcctttacaggatcctgggtgaataaattcccagtggaaatgacacacaaccacaacttccggctgaatgagagagaggtagttaaggtttccatgatgcagaccaaggggaacttcctcgcagcaaatgaccaggagctggactgcgacatcctccagctggaatacgtggggggcatcagcatgctaattgtggtcccacacaagatgtctgggatgaagaccctcgaagcgcaactgacaccccgggtggtggagagatggcaaaaaagcatgacaaacaggtatttcacactgtgtgtttgttcttttgagctcccagatgctgggggtgtctgggaatactggaaaatggatcatttttttaaaaagggagaattatgtacaagtacccaagaacttccatacagggccactctgttaattcagccccaatttgttgcttgagataagagatgattagagagcattcataagggacacatctgccctctaggggccagtttcagaagttagaggcagatgacttagagacagcttggtgcttgctttgtggcttcgagtcccagcttcatcatccctaaaatgggtataattccattacttccccgggtcacttgagaaaataacagaatcagcgatgctgagcgcccctcccagtacttggaacctaggaggcactcaaaaaaagattggctcaactcttccctgcccaggaaattccaaggtcctcttagcctaccgaggacacatcattcatgatttcctctattattattcgttactttgtagttaaaactgcaggtgttaagtacttattgagattattattgggtcatggcagaaagaatggagaggtcttatttctgtcttactggatactggctaggcccatatgaagaagtgattctggtttgaacctccttataggacaagaatacaaacatatgcaaccaaactgagaaaagtaggctctcagaggaaggtatttgcccgggtagccagtcatcatgctctgtgaatttttccttaacaacgtcccttctgtacctgcctccttccattcctccctgcagcccggcagctcttgagaaagggactgcatcttttttttttttttttttttgagacagggtcttgttctgtcacccaggctggagtgcagtggcatcatcatggctcactgcagcctcaacctcctgaacttaagtgatcctctcacctcagcctcctgaatagttgagactacaggcgtgcaccttcatgcccagctaattaaactttttttggtagagatgaggtctcgctgtgttgcccaggctggtcttgaactcctggcctcaagcagtcctcctgccttggccttccaaagtgctgggattaacaggcgtgagccgctgtgcctggcccatttgacttttaattgagatcttacttggtgcaaggtatgagctaggtaaaagagtgaagaagatcaagccttcctgcccatccagctgggattgcaccttaaatctctttatcccctgcaaagtgccagactaactccacaggcactactgttgctatccgcccccttagggattgagtaagttgaggcaaagattgagaatattcagcattgtctagtatatacaggaaaggttctttttaaaagtacactaccagatattcgactccttaattacaaaaaaaaaaccaaatgcctaaaattgggaaaccaaaccagagaattattttagatgcctttttaaaccataaaccaggaaaagttctgctgctaaccttgaagataggaaacgaaccatacagtctcaaggaaataatcatgcaacagaaaacacacctcagttttcagtagcggaattacaaaggagtgtgcttcctaaaatcctcaactgacagtcccggaatataaattttaataagtgctatatcaattctgtgataaatataacccgtggccctttaaagggaaaatcatgattcttttgtaacttgtggttcaataaaactgggcccccctttccttttctgtctagaactcgagaagtgcttctgccgaaattcaagctggagaagaactacaatctagtggagtccctgaagttgatggggatcaggatgctgtttgacaaaaatggcaacatggcaggcatctcagaccaaaggatcgccatcgacctggtaaccactcccttgtccacccccgacccgtccccagggtctgcctcagcacagccccacctccacttgcccttcctacccaccccccaatctcatgtcccagcttggggtgctgagtctgctcttcggcctgggtgggatacacagaatgcctagtttcatggatgccagctggagagcacggcacctggcagacacttactgggcaggggggatcccaagagcagccatggggtgagccccactcccgctgacaccagagacaggggagacatgtgctgcggtctgggaaatagctacccccagccaaatcatgaaagagccattaaacaccgcactatacacatacttaacttaaaccaatcgggcgctcagcaaaagagagagaacaccagtccaaacagtgcagcagacccagttccccatcccggagaagtgcgcagcagtgtggggagctggagctggggtggctgtcctgcaccagcccccacgaccctcagaccacaggcactgccaagagggaacatgaacctagccggcctctaagtgcaacggctgcccctgacaggtggtgacagatattttcaagagtgactctgaccagctgtgatttccaccttacatgttgtctttggatcctttccctgaatgatatgagattgtgctgggaactctagccctctgtgtgctgacctccagaatctgacaactttcctttccaaacagttcaagcaccaaggcacgatcacagtgaacgaggaaggcacccaagccaccactgtgaccacggtggggttcatgccgctgtccacccaagtccgcttcactgtcgaccgcccctttcttttcctcatctacgagcatcgcaccagctgcctgctcttcatgggaagagtggccaaccccagcaggtcctagaggtggaggtctaggtgtctgaagtgccttgggggcaccctcattttgtttccattccaacaacgagaacagagatgttctggcatcatttacgtagtttacgctaccaatctgaattcgaggcccatatgagaggagcttagaaacgaccaagaagagaggcttgttggaatcaattctgcacaatagcccatgctgtaagctcatagaagtcactgtaactgtagtgtgtctgctgttacctagagggtctcacctccccactcttcacagcaaacctgagcagcgcgtcctaagcacctcccgctccggtgaccccatccttgcacacctgactctgtcactcaagcctttctccaccaggcccctcatctgaataccaagcacagaaatgagtggtgtgactaattccttacctctcccaaggagggtacacaactagcaccattcttgatgtccagggaagaagccacctcaagacatatgaggggtgccctgggctaatgttagggcttaattttctcaaagcctgacctttcaaatccatgatgaatgccatcagtccctcctgctgttgcctccctgtgacctggaggacagtgtgtgccatgtctcccatactagagataaataaatgtagccacatttactgtgtatctgttataattctctattttttgaagctcaaatatcaaaagccaaatccaaattcctggataactccaggtatgataaaggctgagaggaagtcacttgagcaccacaatgtgccacagcagggcatgttctcaggacaggacaggtgtgtgctgaatcctggggagggtctgtgcagtaccccagaactgtggggtgctaagtggcacacaagccccagggctcccacagtctatgccaggctgctgcagctttcatccctcatacctggtcctgcagtgggtctggtttgacagagcagatgacacctgaggaatatgtttctggatccttcaatccctgggtaagacaagtgaaatccacagaggctgttcagcacgcaagagtgccagtgctctttcagtgaggggatgactgacggtcacaggtgctgtgtgtgcaggtgtctaactgtaacccccacagcctggcagatgaggaagacaagggttggaagagttctgaaacctgtccaagatgctgaagtagtggggctgggttcaagtgcaggttggctggactccagggaccacacaaggagtcctgtcacaggcttctgaccccatgagaccaataccagtaagaagagtggtaaaagggagtagggacggaaggggaacgtcactgccctttgtaggcatgcctgtgggttatctcacagagtctccttaccctcaatccctagggggctggcactgttacccctcctttttacagctgcagaagcaatttcagctcacagaagggaaggcctctgcctgaggcctgaatccacacccaggcagggggaccctgcagccctgctttcccctgctcccttcctgacttcccacactgggctctgcctccttactctgctgagagcagatggtgcaggggctggatgaattgccccaagccatcctctcggcttcctggtgaaccctgatgctgcggatggcccactccttcaattcattctccaatctgcttcacccctcttcttttctgtcattctccaaactgcttcaccactcttcttttctgtcattctccaacctgcttcaccactcttcttttctggtgcctgtcctatatttctcatcttgctgcagcttccttttggctcttctcatttctaaatgtaataatctcaaaaaacccttttagtcctttgccatgtctgtcccatacccagaaaggcagtggtcacttctgctcacccagcgccctctctgctacagccggtgtggagtcctccacactcttgagcatccagacacccccgtttcaatgccttttgttcatgtacacccactcagaatctctcagatcccctcttacagaaactagcccatctgttactcaaagcaggagagtactcattcagaacacaggctctgagccaggctgcctggtttgaatcctggctctgccatctagtagctatgaaactctagtagcaggttctgtgcctcagtatcctcatctgtaaaatggggagaccagcagcacttaccttgagggattgctgtgaggattaatcaaattaatgtctagaaagcatttatttatttatttatttattcatttattttatttttttgagacggagtctcgctctgttgcccaggctggagtgcaatggcacaatcctggctcactgcaacctccgcctcctgggttcaagcaattctcctgcctaagcctcccgagtagctgggactacaggcacgtgccaccacgcttggctaatttttgtatttttagcagagatgaggtttcaccatgttggacaggctggtctcgaactcctgacctcaggtgatctgcccaccttggcctcccaaagtgttgggattacaggtgtaagccaccatgcctggtctggaaagcatttagatcactgcttggttttagcaagaactaggaaaggttgtcacattattctcaatctaagagagtacataagccaggcc

SEQ ID NO: 2 - DNA, 19805 bp, Homo sapiens
  misc_feature 1..19805: note = Description of origin: ZPI gene
  source 1..19805: mol_type = genomic DNA
aatgtgggttggagcccccatacagaatctctatgggggcactgcctagtggagctgtgagaagacggccaccgtcctccagacccctgaatggtagatccaccgacagcttgcgccatttatccggaaaagccacagacactcaacgccagcccgtgaaagcagccaggagggaggctgtaccctgcaaagccacaggggcagagctgcccaagaccaagggaagctaccttttgcatcaacgtgacctggactcaaaggagatcattttggagctttaaaatttgactgacctgctggatttcagacttgcatgggccctgtaaccacttcgtttaggccaatttctcccatttggaacagccgtatttacccaatacctgtaaccccattgtatctaggcagtaactagcttgcttttgattttacaggctcataggcagaagggacttgccttatctcaggtgagactttggattgtggacttttgggttaatgatgaaatgagttaagactttgggggactgttgagaaggcatgattggttttgaaatgtgaggacatgagatttggcagggccagaggcggaatgatatggtttggctctgtatccccacccaaatctcatcttgaattgtactcccataattcccacatgttgtgggaagggacccagtgggagataatttgaatcatgggggtggttccgccatactgttcttgtgatagtgaataagtctcacaagatctgatgcctttattgggggtttctgcttttgcgtcttcctcattttctcttgccgccaccaggtaagcagtgccttttgcctcccaccatgattctgaggcctccccagccacgtggagctgtaagtgcatttaaacctctttctcttcccagtctcgggtatgtctttatcagcggcgtgaaaatggactaatacactgtggttatgtattatagtcatatgatattttcatatttttggaagctgggtgaagggtagatgtggagaccatgatttttgcaaatttttttaagtttaaagttatttctaaattagaagtttaaaaagaagaaatcacataagccataacacaatagaaagatgtctttaaagttcaaggcaggagggatgtctggaaatcagcgagaaatttgcacctgtgtgtgcatgtgcatatgtgtgtgtgtatgttgcaaggacttggaaagccctttttttcctacctctgtactactgtggggggaggctaaacttgacttcttcccatcttagttcttttttgggatagactcctgtaacaaaagacagacaagagaaaaatcagcttacaacatgggccatgcacttcacacaggagaaacctgcatgaaaagtaactcaaaatggtgccttagaactccacttacctttagtaaagagcaataaattagcaggaaaatcatggatcgggacaagggaagtggttttatgcttccaagggcaggaaatcatggaaggtaaatatatgggaggaaactaaaggaataaggcttgtttgcatattcctctgatgccatctctgggttgataagagtctagagtcatttccagtaaagatgaatttttatctgtctttaggaagaaagggggaaagatagagaaaactatttctccatttgctgtttcttaattaccttcagttcaaaaataatttttatatcagaaaggcatatttagaggtatgttagtttattttcacactgctaataaagacatacccaagactgggtaatttataaagaaaaagaggtttaatggactcaccgttccacatggttggagaggcctcacaatcaaggcaggtcttacatggcagcaggcaagagggagaatgagagccaagcgaaaggaatttccccttaaaaatccccttataaaaccatcagatctcgtgagacttactcactaccacaagaacagtatgggggaaaccacctctatgattcaatgatctcccactgggtaccccccaacaacacgtgggaattatgggagctacaattcaagataagatttgggtggggacacagacagaccatatcaaggggtaacatagtctggtttcctttactacccacctacccaaacacccccttcatctgatccacacaaagtaaactcttgcagttctctcactgtttcctggagtctgcttttggtctcataggactgccctaacgcttgtttttcagacgtttaaccctgtaggtctctggacaaatttgctttagaagcccctcgatgtcgccctgaagagtggctttcagaagttgtgcctcctgcctgaggggagttccaggaagggttctgcatcgcctatgagtttatctggatcaccagaggccttcccgtcagagctttcccaatcgtttttggccaaggagtgtgagaagctaaagttcataacaactggaagtcagacagcctggtctattctgctttaactctagcaggaaaggccttcatggtggggcctgaatatcttcctttataaaatcaaagcctggggacagggttacttacttctgaggttcaatctggctctaaaattatgcaacaaatgccattcctttagcacttccttcctaccgggcgagatactcaactccacaggcaccacctcagttcatcctctcagaagtcctaacagctcagcctggggcaccccattttacagattagtaaactgaggctaagagaggttaggtagcttgttcagggtcatgctgctggtaaaagagctcaggctacagtgctatgcattgagttttctcactttcccatctaactggagggctaaaggtcaaagagtgggcagctcccttgttgggagctgtacaggaataatgtcctccctgaaggagggggacttctgagccacaccctggggtccagggctcacagccttaggagcaaaatcgtccacccccttcctggttcctcggtgctgcagagatattcataggacagagtctgagttctggccacttaacagaggaagaaaggctggctcggtgaggttaacttacatcccagcagctaggaaccgggagcagaggacctcagattcacaccagggcaggaggcaatggcctggctgaagccttcacaatcttcccaatatactccgctgccttcctttataaggatccatttctgaaaccctgtgccctggccaggcacggtggctcacacctgtaattccagtactttgggaggccaaggcaggaggaccacgaggtcaggagtttgagaccagcctggccaatatggtgaaaccccgtctctactaaaaatagaaaaattagcgtggtggcaggcgcctgtaatcccagctactcgggaggctgaggcaggagaactgtttgaacctgggaggtggaggtctcagtgagctgagacagacagtgcctgggtgacagacagagactccgtctcaaaaaaaaaaaaaaaaagaaagaaaccctgtgccctaagacctgcacactcgctggctccgctcagacatttagcaaagcagacaccttcccaggcctggaggaaacagcccctgctttttgggaatccacaagcccgcagctgcagagctcgacctggatgggcaggcaaaggctgactcctgtgcgtggtgtgagtccagcctggcccctctacaccctcactttcacctcttaaagaactgcctattaacagagcaggtactgcccaaaaggaacactctggaaacttgttgggacacttctgcctttcacaaacgtttggggggagtactactagcatttaaggattgagggttagcaatgccagacataccagaacacgcagggcagtctcccatgatgaagaggccgccgggttccccaggactcacatgtccacctcaagttcacgtgggattatctgagcctagactgtcagtcctggggctgctttatttcatataaaaatataatatttatccaaggttttactacacactgcattttctgtgaagacaatgaccgtgtaaatcagggaaagatctatattttattttgtttgaaactttaccaagcattatttaccatttcaaaagctctatccctggtagtaccattggttttcttgttcaccggccagcagtgagcagcacacaagcgacctcccgtgggctccacattggacagcctcactgcacctgcccaggcccttaggccacagcactgccatattcagggacacattattctcttttattatgcctccatattatcattacagcattatcttttttttaattttgtgggtagattatattagctatacgtttcacttcaatggtagtagtaaggggcacataacaaaatatttacttatatatattaaaaaagagagtctgagaagtctgaaaagttttgccataaacggtctccaccagcctcaactctgagtgcccgaggattcagtctcaagtccagcaacattgtgaagcaggaaatttaccttgaaaggagctatgtactctaagtagtgatttacctgtctgcctcccccactggattgaccagttccttgggggctgagagaacaggtcctgaacatttctgctgtgccccccaacccacatcctcatagtgtccagtaccaggctggggactcaggaagcatccatgggatcccccagtgccttctttctcgaggtgttcagcacctagaacagctcaagacaaattccccacaccccacccagacagagctgaatcttactggggcgaagccttgagttgcaaggcagaagctctcgtgatgggatttgggtcatattccgggttataggaggagctggggagtatgggaagcctcccacttggtctttggttttccagaaactccaccatcacaagcaggatgttaatcagtaaccgtcccacaggggatcatactttggaatagcaaatatttgctgaaggttctgggctgcaaagctgaagctttggtttctgctctaaatgaaggacttttccaggacccaaggccacacactggtaagaggcagtgggttacaggagaccttcaatgagtctaatcagggagggaccgggaaggatggtatcatccctgggcgggctccaacgtgagggctgtgtggctgagcagtgcaaagacctccatcctacactccacagggactgtacatacagattgggagctggagtggggtaagaggcgaattatagacacaaggggctcctctgcaggaaggaggccaagggaaagaggcttgaaaggcttgatatttcacccaccaccactcactgccggagtaagcaggtctccccttcccagggctgaggggaggcagggatgtgtgctgtcccagggctgagaagtggcaggtgagctggtgattccttactgcccaggttctgtctaggaaggtgcgtcctcaccatgctggatggtgtcctagtccaggagcaccccctgagctcctggcctagactccaaagggttgggtagatgagcaaagactttacaaagaccttaggcgatatatgtccaggagcacccaggaattactgggctaccactgcagactgcaggacaagctccaagaacaggaaggtaagactcagcatttggaggtggtgacatctagttggcgtgctgggctaatttcctgaccattgtacagggagaagtaaccttgaattcaggagtattctgtgtggtcttaatgtagaaagtagcactaaatgatgccacgtaatcgttttagctcaggctcctctaacaaaacaccacaggctgggtggctccaacagccattgatttttcacagttttggaggctgaaagtccgagtcagggtgccagcgtggccggattctggtagggctgtcttcttggcttgcagatggccaccttcgcaccgtgtcctcccatggagaggaggtgcggagggggactctgctctcttcttatgacagcactagtgctatcacaggggccttgccctcacgacctcatctaaacctaatcacctcccaagcgccccaactctattgccatcacaatggtggttcgggcttcaacttattaattctcaggggacacattcagtccataacaataaaagcgtgaaactgggctgcgtttacactgaaagagctatttacccaacgtttacaatacttgggtgacctgttgaatgcaggcttgccatttagagtcaaaaagagcttcctcaacagtgtcctttgggaaacacagtggaagtatttcactgcttctacaggggagagggtagtgccgttcagactgcagagtgaggccctgaattccggggtgccattcagcccgagcaaggggcaacatgctgggccctggcgctggaggcggttttgtcccaggcatagataaggactcagcccctgcatcaggaagaggcctggcagcaccgcctgtcaatacattttgccgcaggtgaccttggtcaagaataagggtctctgctgatgggaactactgtgaggccggcagcatccaccctgcgctcactgggctgggtggcctaccccacccagaccctcccagggcagtgggcccagagagaggatgagggagggcaggtgtcccaggggttctgcccagccagcctctgggatcaggcctgcagtgtggctgaacaccagaactgagtttggacacagccaggtggcccaggccagtcccaagccatgtatttggatggaaaacatggaagtattcaggagccaggctctgtgtccaaggatgtggagggagcctaaaaggcgacagagaaggggacagctaacggtgaagaagtgtagctcccacactgcagcctaggacagtgagaaccggcatgcagcccaggtggctgagggctctatgaagccacagtggagggagcccagaagtgggttgtatgaattgcggggcctcctgctacccgggagctgcagctataggaaggaaggaaggaaggaagacctccaaggaactgtgtagcagaggtgcagtgcaaagagaattttgataaaaaatccaggaaagctccaatactttcccccttccttgcctaacgggcatgcaggcactccaatccccagccaaacagggcactgggcaaggccggccacccatctggatgggcagcctgacgaccagatggtcagggcagtgaatgaagcagatcaaggaaaggtgtgtgaggacccctgattccacctgcttggacccccaccttctgtgctgcctcctgctcccagagtggactctcttgccctggccctcagggaggagacgggatgaatgaaaacggggtcaggactgagagctgcctgccggcctggcagggaatgggaactggaggaggttttgctctgtgaaataatgtcccctctttgggtgagcaaatgtcacccacacttgctctaggtctccctggggcagggctaacctacttgagccacaggaaggaggcagggtccctgaagaagcttttactatccacaaagacattttaggaggcattaaaaccatctctatcctctcctctccacaggaagtcttgcagctgaagggaggcactccttggcctccgcagccgatcacatgaaggtggtgccaagtctcctgctctccgtcctcctggcacaggtgtggctggtacccggcttggcccccagtcctcagtcgccagagaccccagcccctcagaaccagaccagcagggtagtgcaggctcccaaggaggaagaggaagatgagcaggaggccagcgaggagaaggccagtgaggaagagaaagcctggctgatggccagcaggcagcagcttgccaaggagacttcaaacttcggattcagcctgctgcgaaagatctccatgaggcacgatggcaacatggtcttctctccatttggcatgtccttggccatgacaggcttgatgctgggggccacagggccgactgaaacccagatcaagagagggctccacttgcaggccctgaagcccaccaagcccgggctcctgccttccctctttaagggactcagagagaccctctcccgcaacctggaactgggcctcacacaggggagttttgccttcatccacaaggattttgatgtcaaagagactttcttcaatttatccaagaggtattttgatacagagtgcgtgcctatgaattttcgcaatgcctcacaggccaaaaggctcatgaatcattacattaacaaagagactcgggggaaaattcccaaactgtttgatgagattaatcctgaaaccaaattaattcttgtggattacatcttgttcaaaggtactttgataatgttctgctctcccaaggccacagggccctacgattgtctctccctttcctttcgttaggccagcatatgattaacgctacgtgattttctatgaatgtgttttcacgtttcaaaaacagattgatacacatattgaacagtgccagacgctgtcatttgaggcccttccctggtatcctatgtgcttgtagtccttattattttcagagcactctacatagctcccctctgacacttagaagcatagggtctttccaaaaaacagggggctgggggattatctgggggatttaggattgcatcattgctccttcatttttactttttgaccaactctctgcccttagattcctattatagaaaatagggacactccacctactacagtgttagaggctaaatgagacaatgaatgtaaagtgcccagatgggcttggcacatagcagacactgagtatctattgtttacttgttcttccaaactgccaatcagcaggtagagcaggagttgtctcctttctaaagatgaaaccagctcagagacgttagcttgatcaaggtcacacagtaagtggcagaggcaaaacccaaacaagggcctcctgaccccctgatcctaggttctgtccagccctgcctccctaatggggcactggacgtgggttggatgccactttcgcagagctggcaccagacttacaaagccccggcaggggaagccactttacaaccagccaggccacacccccagggcagacgtttatgtagagagtaatgtacctgcctgctagtagcctctgcattgtggggccttctctcagaaccacactaaacagtgggtgggtgagaagtgtcactcctgccaccttggactctgcatgtgcttgtgcctggtgtgaatgagacaaagtggcagtcagaggtgccaggcaaaggcttttctctaagctggagccaactatgagggaacgactgtgaattccgttcaggtccaggacaatgagaggagccagggattgttaggaaacatttccctgctttcgtgtgcgattcccaatagggcctgcgagtggagctgcattttgctagctgggctagaggacggggaaaattttggggaaatttattttgcctgcctgagctgtggaaaagccaacccaattagggaacgcctttcctagttggaacgagaagacgagaagtgagagaagtgagatagaaggctccctctctattatttgagcaagaacaatgcttttcaaagagggaatttctgcaatgagttcttctcttacttgttcagggaaatggttgaccccatttgaccctgtcttcaccgaagtcgacactttccacctggacaagtacaagaccattaaggtgcccatgatgtacggtgcaggcaagtttgcctccacctttgacaagaattttcgttgtcatgtcctcaaactgccctaccaaggaaatgccaccatgctggtggtcctcatggagaaaatgggtgaccacctcgcccttgaagactacctgaccacagacttggtggagacatggctcagaaacatgaaaaccaggtacaactcttgcccacaccctatacaaactctacctttctgtactggcaaacgctcagcacaatttcattgaatgcaccgtgatttaatgtctcctccagtgagctataagtttcctgaaggcagggcagcatttgtctttttttccactctatccccagcatctgtcacagggtgcctggctgattcattcattgagtccatcagtattttacgttctgcgactgtgataaatatatgatgccagggatccatcagcaaacaaaacaggcaaaattagtctgccctcatgcagcttacattctattgaaggaagacaaagagtaaattaaaaataggtaataatgcagggaaggggacaagaagcatcatcaggatgcagatggaggttagacaaggcctctccaagaaggtaacagtaagcaaacatctgaagatgaaggataaaccatgtggatatattcggggagagaagtgttatgttacaggcagaagtgtacaagttctgggatgggagtgtacctggtgggtttgaagaacatcaaggagacaagtgtggcttcagcagttggagataaaatcagagaggaaacaggggcccagtccccagaaaagacttgggctttcctgagagaggcaggaagccactggatggttctgagtagaggagcaacctgattttgacttctgtttttaaaggatcacataagctcctgtgttgagaaaagacactagggggtaaggatggaagcaagggagagtggttagaaagttactagcaatccaggtagagatgctgctacctggactgcggtggtggtagtggaagtggtgagaagtggctggattctggatctattaggaagtgcaggatctgctaatcgattggatgtgggtgagagaggtgtcaaaggtgatcacaaagtttttggccttagcaactggaaagacggatttgccatttactgaaagggggaggaacaggtctggggtaagtgcagaagttcagtcttaaacacttggatcagaaatatctattagacatccaagttgagatgtcaagacgacaggtggatctggagtctagggtgaggtccaggccggagatataaattcggtcatcaacacagaactagaatctagacacatgacagggttggggtctgtaaatatagaggagaggaaaagaaagcacagagtgggcactgaaatgtctgcccaataaattaatccacctattggagtacaaggaaaatggctgcaatacgaattccatggctatggcttctgaatcctgtgactcagattttggcagacaagtgcagctaaaggtccccagggttagttttatcttcattattcttctttcatttttcttcatatctttagcacctaacaatgaaccccaaacatcataagccctcaagtaatgtttgctgaatgaataactttttaaattaatcttcaagacacgtcatgtcctcaattatttttaaataaataaaaaaattttattttgagccacagaactcatcttttcaagcaacatattttcaaaggaggactccagtatacaaaatagatggtatcagagcttctctggctaaagacgggtaggggttgaaagttttctttgctcccctccccatccatccccagactcctcgggtctgcagaatccaggagctgaaaacagccatcatccaggaggctgcaggactgctgaaagcagctgttaactcaggttttttttaaaatatagggaaatgaacacataagtactttgctaaagaaaacgtgagtcactggctgaggaataaaactcattcactgaagctgaagtactatttgataagctagaaatattttccctgagtagaccactgtaaaagaatggcatgaactacatagtcaactgaaagactcattaatggaaataatcttaaagaacaaaaattgtgacctttttggtgtccacagactagggctttgtctacatttcaccatcatctgttcttgtaccacagaaacatggaagttttctttccgaagttcaagctagatcagaagtatgagatgcatgagctgcttaggcagatgggaatcagaagaatcttctcaccctttgctgaccttagtgaactctcagctactggaagaaatctccaagtatccagggtaagtcaggatctttcatcagagcccaacctcagcatgaaatgtcaccaaaacaaatgcttttacaaaccatttaactttgataaaatacctaattgtagtggaaaattagatttaagtcccaaatacttgaaatagcacccaggttggatgttttaagaatttcaagcaacttcattaaaataacttttcaactaatttattttaagcagacctctccccctctgcttaaagtgctcagggagaaatttgaccctgaaatagaactggtttacagaggcatcatcatttatgttgaatacaacttgaatagttcatgaaattacaccacctttacaatgaaacaaacccctagacatcatctagcccaacttctccctccttgtggaaatcccctccatagccctacgaaatagccctccaacttctcttcctcttcatgcttccagtgacatcaaactcaccatttctttgaagagctgcccaatccacaaatagctaaaattgttatatgtatatatatatatgtgtgtatatatatgtatatatgtatgtgtgtataaatgtatatgtgtgtatatgtgtgtgtgtatatatatatacacacacatatatatatatatggagagagacatacatatatatatggagagagagagagagagagtcctgtaacttctgattcatactttttggtcctagttctatctctaaaacttctaagaacaagtttagtcaccatccacatagaatcccttcagttactcagtgtttctcagtggaagggttcttggttttgaggggaactgcttgttgtccagagcagttgtgcatgttgcagggaactggttagcattgctggcccatgttcactaatgccagtaggaaactccagtcatcactataaaaatgctcccacacatttccaaatggcagctacatctctctacattcttccttagctgtgtggtttaatattttcttatacaattgcaattttcaattccaagagagactaaaaatggcatccacttaagtaggacacagtagggtaactgtggcctggaatcaggtcttacaacctcaagagaggtaagacaattaaataaaacaatccgtcagaccagcacctgaaagtgtttctgctatgaacacatgaaaaactgaaatgcgctgctgctttatgaagggtcatcatgaaatttaaactgtaaatgattaaatattctccctctgtttgctctggggaattaattttcctctaggaaatcagggaatttcctggagtgaaaatcagtgtaattacatgttatgttttcattatctcttataacacagtaattatataggtacatcactcatatcacatcttgtttctgtaaaaaagggcctcccaaacatagcaagcagccacagtataggcagccagaattcaggaaggctccagggacccctgggcttggcccagaaaaatgcctcagagtagtaccaggtgctgggaagctgctacagaagactagccattccctgcctccaccttgcctgccaaaaggaaagtcagaggactcaagggatccagggatcaagggatccaggcagcttgaaaaccttttaggagcaccagctcagctcaagaattagtagcataaattacatgctcaataaagatttgatgcatgagtgcatcctgagtccatgcccggaatgtgtttcacatattccacaatacttcacattgggttcctgaggtctcctggtattgtttaagactcctgtggcagtccctggtgcaaccccagaccactcctcttaacgtagatgggcctgctccactaaatcccaggagcatgaccccatgggtaggaccactgtgaagaatttcaaggggctcatttaattcctcctttgcactgccacacaaatggtttttcacattatttcctttttccaggttttacaaagaacagtgattgaagttgatgaaaggggcactgaggcagtggcaggaatcttgtcagaaattactgcttattccatgcctcctgtcatcaaagtggaccggccatttcatttcatgatctatgaagaaacctctggaatgcttctgtttctgggcagggtggtgaatccgactctcctataattcaggacacgcataagcacttcgtgctgtagtagatgctgaatctgaggtatcaaacacacacaggataccagcaatggatggcaggggagagtgttccttttgttcttaactagtttagggtgttctcaaataaatacagtagtccccacttatctgagggggatacattcaaagacccccagcagatgcctgaaacggtggacagtgctgaaccttatatatattttttcctacacatacatacctatgataaagtttaatttataaattaggcacagtaagagattaacaataataacaacattaagtaaaatgagttacttgaatgcaagcactgcaataccataacagtcaaactgattatagagaaggctactaagtgactcatgggcgaggagcatagacagtgtggagacattgggcaaggggagaattcacatcctgggtgggacagagcaggacaatgcaagattccatcccactactcagaatggcatgctgcttaagacttttagattgtttatttctggaatttttcatttaatgtttttggaccatggttgaccatggttaactgagactgcagaaagcaaaaccatggataagggaggactactacaaaagcattaaattgatacatattttttaagatgtttgtgcaatctgtctggtattttaagcttgtttctaagaaccttagttacttggctaaagactagctgggtagaatatcttttctctgttgctcacatattttcatttttaaaaagttgcagatgagaacactatgtcaagataaagcctttgggaggaacacatgtaaacattctccttgagtcatgtgcttctctctctttccttctctctggtgcaaaataagtgttttattttaatctattacggagtcatttcttgctgactgacatcagaagaaaatagctctaaccagtcctgatcacagcatctgcttccatggtgcatcaaatcgcttggcagaggcattggctgaatcacagatcatctagttcaataccttcattttacaaaggaaagaaagagggacccagaaacaggtccatattcttactttcatgggccctaggcacgtttaaccttgtagactcctccttccttcatgaagatatatatgttctatggctgcattggtagaaagatgaatatattcgtctttcaaagttgcatatctagcttcaaagttatatgtctagcatatggcaataagcaaaacaccttcatgggcccttacagtactgtcagccttgggcactgtgtcttctgcatctagtggataagtcataccttatataccagtgggaacaaaatacttgtccaaggtcttccagtgtggcaatggcagagtcagaagcctacctttcctgagtctagtctccaagccctttttactcttccttccatctaaaacatctgatggggaccaggtaaacagcatgcactacagctacccatgggggttaaacagaatataagcatgaactttgtcccagggtgaaaaggaaaatcgtaaatatccctgatcttccttaggcagttattttctgtcacagaaacagaaaagactatattcagagaatcctgaatagagctgatttacagtgtgaactatgttaactaaatgcctaattggatttctgtctgtctgctatctaatgtttaaaaaaacctaaaattcatttattgattagttgtttaatataattcagagtaatgtgaataggtaataatattaatatgcagtctaaatactgacttttcatcattccataacctggactgatgaaaagtcagtatttagactgcatattaataaaataaaattcattcctgtattcattccaagagtactaattgacacttatgaagggacaggcaattctaggccctagagggccaaagacagaggactaactctatctgacattcttaagtcaccttgtttgtgttcaattagtcagatttgtttgtggaaaaatagtagaaagaggaataaagtagcatccagtccaatttcccacttttaagagatgaaatctggaaaaataagtctgtgagagcacaatactcactgaaatcaatatggccaaacccagtaataaaaaggtacattattattgaaggattcatatagcatgcagataaaaaactcctgccttcttcccaccacatacactgcaaagcaacaacagcataataattgtatttaatatactactctttaaggtagaaaatggacctattctatattttaaatatactttttaatgttccctcacatttgctttaagaagttcctaagacactcagtttcagatttcccaagtacacaggcatgacagaaaaacgcagaccaataaaaaatgtaacttaccttacacaaatacatacacacaaattcagggtttccaaccgagcgggggaaatcttaacattgtagaagtcttcactatatatgtgtcgagtttttgtttttgtttttgtttttgttttgagacagagtcttgctctgtcacccaggctggagtgcagtggtgcgatctcagctcactgcaacctccacctcccgggttcgtgccattctcctgcctcagcctcccgagtagctgggactacaggcacctgccaccacgaccggctaattttttgtattttaagtagagatggggtttcactgtgttagtcaggatggtcttgatctcctgaccttgtgatctgcccgcctcggcctcccaaagtgctgggattacaggcatgagccaccacgcccggccaagtgtcgagtcttaaaaattgttcctacacagacacactcaaccacacgttctcacatatatatgctgtaacaactgagaacaggttactgacttaatctaattcattctatcttcattgtaaaacttccactccagctgaagagcctgtttcatttcaattcaaagatttctcatatatccactaattgtatggcaaaactgactcatctccagactaagatattcaagctcaggaagtcaaataatagaaatgattttttaaatgtgtaagaggttataaagaaaaactttatgtgctccttatttaacctctattaagtaaaatcctttatagacctatctccatttctgcagtaaaagtgagctctacagttagcttgtaaggctaactagtgaaattcctggacttgttcttaaaaatgcaagttttagtaattaacaaaatgatgatgaagatgtcccttttccctacaactacagatggagggagatttttctttgccatacaactagcttaaaggattaatttgataagttgttaaactgagaactttcacaaaagtatccatcttgtttttgatataaatggagatacatgtagttattcataactgtcagtaatttgctgtttatcctgtttctatatatctgtccttgagagtataattttaataaatatttcaaagattttaggaaatgtcatgttctgttaaaaaacttccaaaagtaattttgatgaacagttttgataacttagtactaactaggactaagactgcaattgactgctctacattcctgaactttataagcagtagttgtttctctctgtcaaatcagtgtccccttttcccatttgcatcatgggaaagtgaaaccttataattctgctaaatttattataacaaatacattgaaattctccattttattaaattaatagaatgttatgaatcaaagcaccaaaaaaactgatgcaattttgatgtctcgttctgtaccacattctccagatcttaatatattcagttccacattattggtgctagtaggagacataatgaaaacagttaaatgaaatccacagcgagtatactgattaaccagtactgtcaaatttctcatacctattgaattttaactactgacaaaatgagcagtaacaattccatttacctgattgtcctttggcaaaggatattattaagaatcactaaaaatagccataaagaagccatatggaaggaagaaggaaaacaaatggcatgaaaaggtctctcactgagtaactatgctcttatagttgacgctggtatatttcttttattcactacctaaaaatgaactatcttactctttaattatagaataaaaactgcaggaaagtatttaagactttttttcacaaacacaggtatctcattaacctatgttttattttgagtaaattcattattcattatttcacattataaaaagtaaccacacatacatatgcattcacaaattagatcatctttatcatacatcaatatattttaaaaaacaaatatcttctaatatcaatatagttatatgctgattgcattttgaaatagagaagctgacaatagcttcacacggtatatctcaagaactgacagtttaaaattaagaactgtatatattccacaggcaaattttgatggaaatattagcattagtacaaataaatgctgttgacatagcttaagcatgatagcttggaataacagctgattcagactagattcatcattttaaataaagacaagtacaatctaaaatgtaaacaaagtatttataaaataaattctctaggaaataaagaaaatcatcaatctattatttttaaggtatttatagctcaaagttaccagaaatctttgtggaattttcactgccaaatttaaatttgggaatgtccgggtacaacatattgtcaccacaatccggagggccgccaaaatcgcagacggctatttgcatcctttcagtgtgacttttcaagtgggcttggagactcatgagaaaatgcagtatctttctcaccttccaagtccccctccaagtgcttatcaagctaggacaattcagctgatgtagactttcatacgatttttaaatgctaaaactctagaacaattaaatggctggtttcctgcacaaataaatgcagacttgtctcttttgcagcagtggttaaagcacattcctagagatgtttttcattacacttcactataacattggaattccgtaaccacattattactcaagaaatatatattatacctcctagggaatctaatttgaaatatgaaaagtttaacatcagctgtcattatgtctctctttctgctcattaacaacaacaaaaaaaaaaacccaaaatttaaaaacaaagccccagccactgctttagcttttgtgtaccaatcacattatctcctgctgcctttgttttgcctccttcatcaagcagttgatttaaggattggattttctggattttctttgggaagaaagaaatgaaggaagagagggagggtggggaaggagggagtgagaaagggagaaaaagaaaaaaatatgaaaaatgttattcatataatgtgtacaaagtaaattaaaaatatatagatactctactttgaataattctaatatatgagaagt

SEQ ID NO: 3 - RNA, 23 nt, Homo sapiens
  misc_feature 1..23: note = Description of origin: HCII mRNA target sequences
  misc_feature 1..23: note = Source of sequence: Starting position on NM_000185.4: 946
  source 1..23: mol_type = mRNA
ggtgaataaattcccagtggaaa

SEQ ID NO: 4 - RNA, 23 nt, Homo sapiens
  misc_feature 1..23: note = Description of origin: HCII mRNA target sequences
  misc_feature 1..23: note = Source of sequence: Starting position on NM_000185.4: 920
  source 1..23: mol_type = mRNA
aactgcatctacttcaaaggatc

SEQ ID NO: 5 - RNA, 23 nt, Homo sapiens
  misc_feature 1..23: note = Description of origin: HCII mRNA target sequences
  misc_feature 1..23: note = Source of sequence: Starting position on NM_000185.4: 919
  source 1..23: mol_type = mRNA
caactgcatctacttcaaaggat

SEQ ID NO: 6 - RNA, 23 nt, Homo sapiens
  misc_feature 1..23: note = Description of origin: HCII mRNA target sequences
  misc_feature 1..23: note = Source of sequence: Starting position on NM_000185.4: 557
  source 1..23: mol_type = mRNA
aagggagagacccatgaacaagt

SEQ ID NO: 7 - RNA, 23 nt, Homo sapiens
  misc_feature 1..23: note = Description of origin: HCII mRNA target sequences
  misc_feature 1..23: note = Source of sequence: Starting position on NM_000185.4: 944
  source 1..23: mol_type = mRNA
tgggtgaataaattcccagtgga

SEQ ID NO: 8 - RNA, 23 nt, Homo sapiens
  misc_feature 1..23: note = Description of origin: HCII mRNA target sequences
  misc_feature 1..23: note = Source of sequence: Starting position on NM_000185.4: 676
  source 1..23: mol_type = mRNA
cttcaggaggaattttgggtaca

SEQ ID NO: 9 - RNA, 23 nt, Homo sapiens
  misc_feature 1..23: note = Description of origin: HCII mRNA target sequences
  misc_feature 1..23: note = Source of sequence: Starting position on NM_000185.4: 1501
  source 1..23: mol_type = mRNA
cagctgcctgctcttcatgggaa

SEQ ID NO: 10 - RNA, 23 nt, Homo sapiens
  misc_feature 1..23: note = Description of origin: HCII mRNA target sequences
  misc_feature 1..23: note = Source of sequence: Starting position on NM_000185.4: 854
  source 1..23: mol_type = mRNA
ctcaccaagggcctcataaaaga

SEQ ID NO: 11 - RNA, 23 nt, Homo sapiens
  misc_feature 1..23: note = Description of origin: HCII mRNA target sequences
  misc_feature 1..23: note = Source of sequence: Starting position on NM_000185.4: 716
  source 1..23: mol_type = mRNA
gacctttatatccagaagcagtt

SEQ ID NO: 12 - RNA, 23 nt, Homo sapiens
  misc_feature 1..23: note = Description of origin: HCII mRNA target sequences
  misc_feature 1..23: note = Source of sequence: Starting position on NM_000185.4: 917
  source 1..23: mol_type = mRNA
ctcaactgcatctacttcaaagg

SEQ ID NO: 13 - RNA, 23 nt, Homo sapiens
  misc_feature 1..23: note = Description of origin: HCII mRNA target sequences
  misc_feature 1..23: note = Source of sequence: Starting position on NM_000185.4: 407
  source 1..23: mol_type = mRNA
aagagccggatccagcgtcttaa

SEQ ID NO: 14 - RNA, 23 nt, Homo sapiens
  misc_feature 1..23: note = Description of origin: HCII mRNA target sequences
  misc_feature 1..23: note = Source of sequence: Starting position on NM_000185.4: 414
  source 1..23: mol_type = mRNA
ggatccagcgtcttaacatcctc

SEQ ID NO: 15 - RNA, 23 nt, Homo sapiens
  misc_feature 1..23: note = Description of origin: HCII mRNA target sequences
  misc_feature 1..23: note = Source of sequence: Starting position on NM_000185.4: 1191
  source 1..23: mol_type = mRNA
ggcaaaaaagcatgacaaacaga

SEQ ID NO: 16 - RNA, 23 nt, Homo sapiens
  misc_feature 1..23: note = Description of origin: HCII mRNA target sequences
  misc_feature 1..23: note = Source of sequence: Starting position on NM_000185.4: 677
  source 1..23: mol_type = mRNA
ttcaggaggaattttgggtacac

SEQ ID NO: 17 - RNA, 23 nt, Homo sapiens
  misc_feature 1..23: note = Description of origin: HCII mRNA target sequences
  misc_feature 1..23: note = Source of sequence: Starting position on NM_000185.4: 974
  source 1..23: mol_type = mRNA
cacaaccacaacttccggctgaa

SEQ ID NO: 18 - RNA, 23 nt, Homo sapiens
  misc_feature 1..23: note = Description of origin: HCII mRNA target sequences
  misc_feature 1..23: note = Source of sequence: Starting position on NM_000185.4: 1189
  source 1..23: mol_type = mRNA
atggcaaaaaagcatgacaaaca

SEQ ID NO: 19 - RNA, 23 nt, Homo sapiens
  misc_feature 1..23: note = Description of origin: HCII mRNA target sequences
  misc_feature 1..23: note = Source of sequence: Starting position on NM_000185.4: 947
  source 1..23: mol_type = mRNA
gtgaataaattcccagtggaaat

SEQ ID NO: 20 - RNA, 23 nt, Homo sapiens
  misc_feature 1..23: note = Description of origin: HCII mRNA target sequences
  misc_feature 1..23: note = Source of sequence: Starting position on NM_000185.4: 1100
  source 1..23: mol_type = mRNA
gggggcatcagcatgctaattgt

SEQ ID NO: 21 - RNA, 23 nt, Homo sapiens
  misc_feature 1..23: note = Description of origin: HCII mRNA target sequences
  misc_feature 1..23: note = Source of sequence: Starting position on NM_000185.4: 1193
  source 1..23: mol_type = mRNA
caaaaaagcatgacaaacagaac

SEQ ID NO: 22 - RNA, 23 nt, Homo sapiens
  misc_feature 1..23: note = Description of origin: HCII mRNA target sequences
  misc_feature 1..23: note = Source of sequence: Starting position on NM_000185.4: 771
  source 1..23: mol_type = mRNA
gagagtattactttgctgaggcc

SEQ ID NO: 23 - RNA, 23 nt, Homo sapiens
  misc_feature 1..23: note = Description of origin: ZPI mRNA target sequences
  misc_feature 1..23: note = Source of sequence: Starting position on NM_016186.3: 991
  source 1..23: mol_type = mRNA
tttgccttcatccacaaggattt

SEQ ID NO: 24 - RNA, 23 nt, Homo sapiens
  misc_feature 1..23: note = Description of origin: ZPI mRNA target sequences
  misc_feature 1..23: note = Source of sequence: Starting position on NM_016186.3: 756
  source 1..23: mol_type = mRNA
gctgcgaaagatctccatgaggc

SEQ ID NO: 25 - RNA, 23 nt, Homo sapiens
  misc_feature 1..23: note = Description of origin: ZPI mRNA target sequences
  misc_feature 1..23: note = Source of sequence: Starting position on NM_016186.3: 1390
  source 1..23: mol_type = mRNA
atgctggtggtcctcatggagaa

SEQ ID NO: 26 - RNA, 23 nt, Homo sapiens
  misc_feature 1..23: note = Description of origin: ZPI mRNA target sequences
  misc_feature 1..23: note = Source of sequence: Starting position on NM_016186.3: 757
  source 1..23: mol_type = mRNA
ctgcgaaagatctccatgaggca

SEQ ID NO: 27 - RNA, 23 nt, Homo sapiens
  misc_feature 1..23: note = Description of origin: ZPI mRNA target sequences
  misc_feature 1..23: note = Source of sequence: Starting position on NM_016186.3: 1531
  source 1..23: mol_type = mRNA
aagtatgagatgcatgagctgct

SEQ ID NO: 28 - RNA, 23 nt, Homo sapiens
  misc_feature 1..23: note = Description of origin: ZPI mRNA target sequences
  misc_feature 1..23: note = Source of sequence: Starting position on NM_016186.3: 1156
  source 1..23: mol_type = mRNA
ctgtttgatgagattaatcctga

SEQ ID NO: 29 - RNA, 23 nt, Homo sapiens
  misc_feature 1..23: note = Description of origin: ZPI mRNA target sequences
  misc_feature 1..23: note = Source of sequence: Starting position on NM_016186.3: 1162
  source 1..23: mol_type = mRNA
gatgagattaatcctgaaaccaa

SEQ ID NO: 30 - RNA, 23 nt, Homo sapiens
  misc_feature 1..23: note = Description of origin: ZPI mRNA target sequences
  misc_feature 1..23: note = Source of sequence: Starting position on NM_016186.3: 1159
  source 1..23: mol_type = mRNA
tttgatgagattaatcctgaaac

SEQ ID NO: 31 - RNA, 23 nt, Homo sapiens
  misc_feature 1..23: note = Description of origin: ZPI mRNA target sequences
  misc_feature 1..23: note = Source of sequence: Starting position on NM_016186.3: 1161
  source 1..23: mol_type = mRNA
tgatgagattaatcctgaaacca

SEQ ID NO: 32 - RNA, 23 nt, Homo sapiens
  misc_feature 1..23: note = Description of origin: ZPI mRNA target sequences
  misc_feature 1..23: note = Source of sequence: Starting position on NM_016186.3: 1160
  source 1..23: mol_type = mRNA
ttgatgagattaatcctgaaacc

SEQ ID NO: 33 - RNA, 23 nt, Homo sapiens
  misc_feature 1..23: note = Description of origin: ZPI mRNA target sequences
  misc_feature 1..23: note = Source of sequence: Starting position on NM_016186.3: 1154
  source 1..23: mol_type = mRNA
aactgtttgatgagattaatcct

SEQ ID NO: 34 - RNA, 23 nt, Homo sapiens
  misc_feature 1..23: note = Description of origin: ZPI mRNA target sequences
  misc_feature 1..23: note = Source of sequence: Starting position on NM_016186.3: 988
  source 1..23: mol_type = mRNA
agttttgccttcatccacaagga

SEQ ID NO: 35 - RNA, 23 nt, Homo sapiens
  misc_feature 1..23: note = Description of origin: ZPI mRNA target sequences
  misc_feature 1..23: note = Source of sequence: Starting position on NM_016186.3: 758
  source 1..23: mol_type = mRNA
tgcgaaagatctccatgaggcac

SEQ ID NO: 36 - RNA, 23 nt, Homo sapiens
  misc_feature 1..23: note = Description of origin: ZPI mRNA target sequences
  misc_feature 1..23: note = Source of sequence: Starting position on NM_016186.3: 1389
  source 1..23: mol_type = mRNA
catgctggtggtcctcatggaga

SEQ ID NO: 37 - RNA, 23 nt, Homo sapiens
  misc_feature 1..23: note = Description of origin: ZPI mRNA target sequences
  misc_feature 1..23: note = Source of sequence: Starting position on NM_016186.3: 993
  source 1..23: mol_type = mRNA
tgccttcatccacaaggattttg

SEQ ID NO: 38 - RNA, 23 nt, Homo sapiens
  misc_feature 1..23: note = Description of origin: ZPI mRNA target sequences
  misc_feature 1..23: note = Source of sequence: Starting position on NM_016186.3: 759
  source 1..23: mol_type = mRNA
gcgaaagatctccatgaggcacg

SEQ ID NO: 39 - RNA, 23 nt, Homo sapiens
  misc_feature 1..23: note = Description of origin: ZPI mRNA target sequences
  misc_feature 1..23: note = Source of sequence: Starting position on NM_016186.3: 995
  source 1..23: mol_type = mRNA
ccttcatccacaaggattttgat

SEQ ID NO: 40 - RNA, 23 nt, Homo sapiens
  misc_feature 1..23: note = Description of origin: ZPI mRNA target sequences
  misc_feature 1..23: note = Source of sequence: Starting position on NM_016186.3: 1157
  source 1..23: mol_type = mRNA
tgtttgatgagattaatcctgaa

SEQ ID NO: 41 - RNA, 23 nt, Homo sapiens
  misc_feature 1..23: note = Description of origin: ZPI mRNA target sequences
  misc_feature 1..23: note = Source of sequence: Starting position on NM_016186.3: 990
  source 1..23: mol_type = mRNA
ttttgccttcatccacaaggatt

SEQ ID NO: 42 - RNA, 23 nt, Homo sapiens
  misc_feature 1..23: note = Description of origin: ZPI mRNA target sequences
  misc_feature 1..23: note = Source of sequence: Starting position on NM_016186.3: 763
  source 1..23: mol_type = mRNA
aagatctccatgaggcacgatgg

SEQ ID NO: 43 - RNA, 23 nt, synthetic construct
  misc_feature 1..23: note = Description of origin: HCII siRNA antisense strands
  misc_feature 1..23: note = Source of sequence: Corresponding positions on reference sequence NM_000185.4: 946-967
  source 1..23: mol_type = other RNA
tttccactgggaatttattcacc

SEQ ID NO: 44 - RNA, 23 nt, synthetic construct
  misc_feature 1..23: note = Description of origin: HCII siRNA antisense strands
  misc_feature 1..23: note = Source of sequence: Corresponding positions on reference sequence NM_000185.4: 920-941
  source 1..23: mol_type = other RNA
gatcctttgaagtagatgcagtt

SEQ ID NO: 45 - RNA, 23 nt, synthetic construct
  misc_feature 1..23: note = Description of origin: HCII siRNA antisense strands
  misc_feature 1..23: note = Source of sequence: Corresponding positions on reference sequence NM_000185.4: 919-940
  source 1..23: mol_type = other RNA
atcctttgaagtagatgcagttg

SEQ ID NO: 46 - RNA, 23 nt, synthetic construct
  misc_feature 1..23: note = Description of origin: HCII siRNA antisense strands
  misc_feature 1..23: note = Source of sequence: Corresponding positions on reference sequence NM_000185.4: 557-578
  source 1..23: mol_type = other RNA
acttgttcatgggtctctccctt

SEQ ID NO: 47 - RNA, 23 nt, synthetic construct
  misc_feature 1..23: note = Description of origin: HCII siRNA antisense strands
  misc_feature 1..23: note = Source of sequence: Corresponding positions on reference sequence NM_000185.4: 944-965
  source 1..23: mol_type = other RNA
tccactgggaatttattcaccca

SEQ ID NO: 48 - RNA, 23 nt, synthetic construct
  misc_feature 1..23: note = Description of origin: HCII siRNA antisense strands
  misc_feature 1..23: note = Source of sequence: Corresponding positions on reference sequence NM_000185.4: 676-697
  source 1..23: mol_type = other RNA
tgtacccaaaattcctcctgaag

SEQ ID NO: 49 - RNA, 23 nt, synthetic construct
  misc_feature 1..23: note = Description of origin: HCII siRNA antisense strands
  misc_feature 1..23: note = Source of sequence: Corresponding positions on reference sequence NM_000185.4: 1501-1522
  source 1..23: mol_type = other RNA
ttcccatgaagagcaggcagctg

SEQ ID NO: 50 - RNA, 23 nt, synthetic construct
  misc_feature 1..23: note = Description of origin: HCII siRNA antisense strands
  misc_feature 1..23: note = Source of sequence: Corresponding positions on reference sequence NM_000185.4: 854-875
  source 1..23: mol_type = other RNA
tcttttatgaggcccttggtgag

SEQ ID NO: 51 - RNA, 23 nt, synthetic construct
  misc_feature 1..23: note = Description of origin: HCII siRNA antisense strands
  misc_feature 1..23: note = Source of sequence: Corresponding positions on reference sequence NM_000185.4: 716-737
  source 1..23: mol_type = other RNA
aactgcttctggatataaaggtc

SEQ ID NO: 52 - RNA, 23 nt, synthetic construct
  misc_feature 1..23: note = Description of origin: HCII siRNA antisense strands
  misc_feature 1..23: note = Source of sequence: Corresponding positions on reference sequence NM_000185.4: 917-938
  source 1..23: mol_type = other RNA
cctttgaagtagatgcagttgag

SEQ ID NO: 53 - RNA, 23 nt, synthetic construct
  misc_feature 1..23: note = Description of origin: HCII siRNA antisense strands
  misc_feature 1..23: note = Source of sequence: Corresponding positions on reference sequence NM_000185.4: 407-428
  source 1..23: mol_type = other RNA
ttaagacgctggatccggctctt

SEQ ID NO: 54 - RNA, 23 nt, synthetic construct
  misc_feature 1..23: note = Description of origin: HCII siRNA antisense strands
  misc_feature 1..23: note = Source of sequence: Corresponding positions on reference sequence NM_000185.4: 414-435
  source 1..23: mol_type = other RNA
gaggatgttaagacgctggatcc

SEQ ID NO: 55 - RNA, 23 nt, synthetic construct
  misc_feature 1..23: note = Description of origin: HCII siRNA antisense strands
  misc_feature 1..23: note = Source of sequence: Corresponding positions on reference sequence NM_000185.4: 1191-1212
  source 1..23: mol_type = other RNA
tctgtttgtcatgcttttttgcc

SEQ ID NO: 56 - RNA, 23 nt, synthetic construct
  misc_feature 1..23: note = Description of origin: HCII siRNA antisense strands
  misc_feature 1..23: note = Source of sequence: Corresponding positions on reference sequence NM_000185.4: 677-698
  source 1..23: mol_type = other RNA
gtgtacccaaaattcctcctgaa

SEQ ID NO: 57 - RNA, 23 nt, synthetic construct
  misc_feature 1..23: note = Description of origin: HCII siRNA antisense strands
  misc_feature 1..23: note = Source of sequence: Corresponding positions on reference sequence NM_000185.4: 974-995
  source 1..23: mol_type = other RNA
ttcagccggaagttgtggttgtg

SEQ ID NO: 58 - RNA, 23 nt, synthetic construct
  misc_feature 1..23: note = Description of origin: HCII siRNA antisense strands
  misc_feature 1..23: note = Source of sequence: Corresponding positions on reference sequence NM_000185.4: 1189-1210
  source 1..23: mol_type = other RNA
tgtttgtcatgcttttttgccat

SEQ ID NO: 59 - RNA, 23 nt, synthetic construct
  misc_feature 1..23: note = Description of origin: HCII siRNA antisense strands
  misc_feature 1..23: note = Source of sequence: Corresponding positions on reference sequence NM_000185.4: 947-968
  source 1..23: mol_type = other RNA
atttccactgggaatttattcac

SEQ ID NO: 60 - RNA, 23 nt, synthetic construct
  misc_feature 1..23: note = Description of origin: HCII siRNA antisense strands
  misc_feature 1..23: note = Source of sequence: Corresponding positions on reference sequence NM_000185.4: 1100-1121
  source 1..23: mol_type = other RNA
acaattagcatgctgatgccccc

SEQ ID NO: 61 - RNA, 23 nt, synthetic construct
  misc_feature 1..23: note = Description of origin: HCII siRNA antisense strands
  misc_feature 1..23: note = Source of sequence: Corresponding positions on reference sequence NM_000185.4: 1193-1214
  source 1..23: mol_type = other RNA
gttctgtttgtcatgcttttttg

SEQ ID NO: 62 - RNA, 23 nt, synthetic construct
  misc_feature 1..23: note = Description of origin: HCII siRNA antisense strands
  misc_feature 1..23: note = Source of sequence: Corresponding positions on reference sequence NM_000185.4: 771-792
  source 1..23: mol_type = other RNA
ggcctcagcaaagtaatactctc

SEQ ID NO: 63 - RNA, 23 nt, synthetic construct
  misc_feature 1..23: note = Description of origin: ZPI siRNA antisense strands
  misc_feature 1..23: note = Source of sequence: Corresponding positions on reference sequence NM_016186.3: 991-1012
  source 1..23: mol_type = other RNA
aaatccttgtggatgaaggcaaa

SEQ ID NO: 64 - RNA, 23 nt, synthetic construct
  misc_feature 1..23: note = Description of origin: ZPI siRNA antisense strands
  misc_feature 1..23: note = Source of sequence: Corresponding positions on reference sequence NM_016186.3: 756-777
  source 1..23: mol_type = other RNA
gcctcatggagatctttcgcagc

SEQ ID NO: 65 - RNA, 23 nt, synthetic construct
  misc_feature 1..23: note = Description of origin: ZPI siRNA antisense strands
  misc_feature 1..23: note = Source of sequence: Corresponding positions on reference sequence NM_016186.3: 1390-1411
  source 1..23: mol_type = other RNA
ttctccatgaggaccaccagcat

SEQ ID NO: 66 - RNA, 23 nt, synthetic construct
  misc_feature 1..23: note = Description of origin: ZPI siRNA antisense strands
  misc_feature 1..23: note = Source of sequence: Corresponding positions on reference sequence NM_016186.3: 757-778
  source 1..23: mol_type = other RNA
tgcctcatggagatctttcgcag

SEQ ID NO: 67 - RNA, 23 nt, synthetic construct
  misc_feature 1..23: note = Description of origin: ZPI siRNA antisense strands
  misc_feature 1..23: note = Source of sequence: Corresponding positions on reference sequence NM_016186.3: 1531-1552
  source 1..23: mol_type = other RNA
agcagctcatgcatctcatactt

SEQ ID NO: 68 - RNA, 23 nt, synthetic construct
  misc_feature 1..23: note = Description of origin: ZPI siRNA antisense strands
  misc_feature 1..23: note = Source of sequence: Corresponding positions on reference sequence NM_016186.3: 1156-1177
  source 1..23: mol_type = other RNA
tcaggattaatctcatcaaacag

SEQ ID NO: 69 - RNA, 23 nt, synthetic construct
  misc_feature 1..23: note = Description of origin: ZPI siRNA antisense strands
  misc_feature 1..23: note = Source of sequence: Corresponding positions on reference sequence NM_016186.3: 1162-1183
  source 1..23: mol_type = other RNA
ttggtttcaggattaatctcatc

SEQ ID NO: 70 - RNA, 23 nt, synthetic construct
  misc_feature 1..23: note = Description of origin: ZPI siRNA antisense strands
  misc_feature 1..23: note = Source of sequence: Corresponding positions on reference sequence NM_016186.3: 1159-1180
  source 1..23: mol_type = other RNA
gtttcaggattaatctcatcaaa

SEQ ID NO: 71 - RNA, 23 nt, synthetic construct
  misc_feature 1..23: note = Description of origin: ZPI siRNA antisense strands
  misc_feature 1..23: note = Source of sequence: Corresponding positions on reference sequence NM_016186.3: 1161-1182
  source 1..23: mol_type = other RNA
tggtttcaggattaatctcatca

SEQ ID NO: 72 - RNA, 23 nt, synthetic construct
  misc_feature 1..23: note = Description of origin: ZPI siRNA antisense strands
  misc_feature 1..23: note = Source of sequence: Corresponding positions on reference sequence NM_016186.3: 1160-1181
  source 1..23: mol_type = other RNA
ggtttcaggattaatctcatcaa

SEQ ID NO: 73 - RNA, 23 nt, synthetic construct
  misc_feature 1..23: note = Description of origin: ZPI siRNA antisense strands
  misc_feature 1..23: note = Source of sequence: Corresponding positions on reference sequence NM_016186.3: 1154-1175
  source 1..23: mol_type = other RNA
aggattaatctcatcaaacagtt

SEQ ID NO: 74 - RNA, 23 nt, synthetic construct
  misc_feature 1..23: note = Description of origin: ZPI siRNA antisense strands
  misc_feature 1..23: note = Source of sequence: Corresponding positions on reference sequence NM_016186.3: 988-1009
  source 1..23: mol_type = other RNA
tccttgtggatgaaggcaaaact

SEQ ID NO: 75 - RNA, 23 nt, synthetic construct
  misc_feature 1..23: note = Description of origin: ZPI siRNA antisense strands
  misc_feature 1..23: note = Source of sequence: Corresponding positions on reference sequence NM_016186.3: 758-779
  source 1..23: mol_type = other RNA
gtgcctcatggagatctttcgca

SEQ ID NO: 76 - RNA, 23 nt, synthetic construct
  misc_feature 1..23: note = Description of origin: ZPI siRNA antisense strands
  misc_feature 1..23: note = Source of sequence: Corresponding positions on reference sequence NM_016186.3: 1389-1410
  source 1..23: mol_type = other RNA
tctccatgaggaccaccagcatg

SEQ ID NO: 77 - RNA, 23 nt, synthetic construct
  misc_feature 1..23: note = Description of origin: ZPI siRNA antisense strands
  misc_feature 1..23: note = Source of sequence: Corresponding positions on reference sequence NM_016186.3: 993-1014
  source 1..23: mol_type = other RNA
caaaatccttgtggatgaaggca

SEQ ID NO: 78 - RNA, 23 nt, synthetic construct
  misc_feature 1..23: note = Description of origin: ZPI siRNA antisense strands
  misc_feature 1..23: note = Source of sequence: Corresponding positions on reference sequence NM_016186.3: 759-780
  source 1..23: mol_type = other RNA
cgtgcctcatggagatctttcgc

SEQ ID NO: 79 - RNA, 23 nt, synthetic construct
  misc_feature 1..23: note = Description of origin: ZPI siRNA antisense strands
  misc_feature 1..23: note = Source of sequence: Corresponding positions on reference sequence NM_016186.3: 995-1016
  source 1..23: mol_type = other RNA
atcaaaatccttgtggatgaagg

SEQ ID NO: 80 - RNA, 23 nt, synthetic construct
  misc_feature 1..23: note = Description of origin: ZPI siRNA antisense strands
  misc_feature 1..23: note = Source of sequence: Corresponding positions on reference sequence NM_016186.3: 1157-1178
  source 1..23: mol_type = other RNA
ttcaggattaatctcatcaaaca

SEQ ID NO: 81 - RNA, 23 nt, synthetic construct
  misc_feature 1..23: note = Description of origin: ZPI siRNA antisense strands
  misc_feature 1..23: note = Source of sequence: Corresponding positions on reference sequence NM_016186.3: 990-1011
  source 1..23: mol_type = other RNA
aatccttgtggatgaaggcaaaa

SEQ ID NO: 82 - RNA, 23 nt, synthetic construct
  misc_feature 1..23: note = Description of origin: ZPI siRNA antisense strands
  misc_feature 1..23: note = Source of sequence: Corresponding positions on reference sequence NM_016186.3: 763-784
  source 1..23: mol_type = other RNA
ccatcgtgcctcatggagatctt

SEQ ID NO: 83 - RNA, 21 nt, synthetic construct
  misc_feature 1..21: note = Description of origin: HCII siRNA sense strands
  misc_feature 1..21: note = Source of sequence: Corresponding positions on reference sequence NM_000185.4: 946-967
  source 1..21: mol_type = other RNA
tgaataaattcccagtggaaa

SEQ ID NO: 84 - RNA, 21 nt, synthetic construct
  misc_feature 1..21: note = Description of origin: HCII siRNA sense strands
  misc_feature 1..21: note = Source of sequence: Corresponding positions on reference sequence NM_000185.4: 920-941
  source 1..21: mol_type = other RNA
ctgcatctacttcaaaggatc

SEQ ID NO: 85 - RNA, 21 nt, synthetic construct
  misc_feature 1..21: note = Description of origin: HCII siRNA sense strands
  misc_feature 1..21: note = Source of sequence: Corresponding positions on reference sequence NM_000185.4: 919-940
  source 1..21: mol_type = other RNA
actgcatctacttcaaaggat

SEQ ID NO: 86 - RNA, 21 nt, synthetic construct
  misc_feature 1..21: note = Description of origin: HCII siRNA sense strands
  misc_feature 1..21: note = Source of sequence: Corresponding positions on reference sequence NM_000185.4: 557-578
  source 1..21: mol_type = other RNA
gggagagacccatgaacaagt

SEQ ID NO: 87 - RNA, 21 nt, synthetic construct
  misc_feature 1..21: note = Description of origin: HCII siRNA sense strands
  misc_feature 1..21: note = Source of sequence: Corresponding positions on reference sequence NM_000185.4: 944-965
  source 1..21: mol_type = other RNA
ggtgaataaattcccagtgga

SEQ ID NO: 88 - RNA, 21 nt, synthetic construct
  misc_feature 1..21: note = Description of origin: HCII siRNA sense strands
  misc_feature 1..21: note = Source of sequence: Corresponding positions on reference sequence NM_000185.4: 676-697
  source 1..21: mol_type = other RNA
tcaggaggaattttgggtaca

SEQ ID NO: 89 - RNA, 21 nt, synthetic construct
  misc_feature 1..21: note = Description of origin: HCII siRNA sense strands
  misc_feature 1..21: note = Source of sequence: Corresponding positions on reference sequence NM_000185.4: 1501-1522
  source 1..21: mol_type = other RNA
gctgcctgctcttcatgggaa

SEQ ID NO: 90 - RNA, 21 nt, synthetic construct
  misc_feature 1..21: note = Description of origin: HCII siRNA sense strands
  misc_feature 1..21: note = Source of sequence: Corresponding positions on reference sequence NM_000185.4: 854-875
  source 1..21: mol_type = other RNA
caccaagggcctcataaaaga

SEQ ID NO: 91 - RNA, 21 nt, synthetic construct
  misc_feature 1..21: note = Description of origin: HCII siRNA sense strands
  misc_feature 1..21: note = Source of sequence: Corresponding positions on reference sequence NM_000185.4: 716-737
  source 1..21: mol_type = other RNA
cctttatatccagaagcagtt

SEQ ID NO: 92 - RNA, 21 nt, synthetic construct
  misc_feature 1..21: note = Description of origin: HCII siRNA sense strands
  misc_feature 1..21: note = Source of sequence: Corresponding positions on reference sequence NM_000185.4: 917-938
  source 1..21: mol_type = other RNA
caactgcatctacttcaaagg

SEQ ID NO: 93 - RNA, 21 nt, synthetic construct
  misc_feature 1..21: note = Description of origin: HCII siRNA sense strands
  misc_feature 1..21: note = Source of sequence: Corresponding positions on reference sequence NM_000185.4: 407-428
  source 1..21: mol_type = other RNA
gagccggatccagcgtcttaa

SEQ ID NO: 94 - RNA, 21 nt, synthetic construct
  misc_feature 1..21: note = Description of origin: HCII siRNA sense strands
  misc_feature 1..21: note = Source of sequence: Corresponding positions on reference sequence NM_000185.4: 414-435
  source 1..21: mol_type = other RNA
atccagcgtcttaacatcctc

SEQ ID NO: 95 - RNA, 21 nt, synthetic construct
  misc_feature 1..21: note = Description of origin: HCII siRNA sense strands
  misc_feature 1..21: note = Source of sequence: Corresponding positions on reference sequence NM_000185.4: 1191-1212
  source 1..21: mol_type = other RNA
caaaaaagcatgacaaacaga

SEQ ID NO: 96 - RNA, 21 nt, synthetic construct
  misc_feature 1..21: note = Description of origin: HCII siRNA sense strands
  misc_feature 1..21: note = Source of sequence: Corresponding positions on reference sequence NM_000185.4: 677-698
  source 1..21: mol_type = other RNA
caggaggaattttgggtacac

SEQ ID NO: 97 - RNA, 21 nt, synthetic construct
  misc_feature 1..21: note = Description of origin: HCII siRNA sense strands
  misc_feature 1..21: note = Source of sequence: Corresponding positions on reference sequence NM_000185.4: 974-995
  source 1..21: mol_type = other RNA
caaccacaacttccggctgaa

SEQ ID NO: 98 - RNA, 21 nt, synthetic construct
  misc_feature 1..21: note = Description of origin: HCII siRNA sense strands
  misc_feature 1..21: note = Source of sequence: Corresponding positions on reference sequence NM_000185.4: 1189-1210
  source 1..21: mol_type = other RNA
ggcaaaaaagcatgacaaaca

SEQ ID NO: 99 - RNA, 21 nt, synthetic construct
  misc_feature 1..21: note = Description of origin: HCII siRNA sense strands
  misc_feature 1..21: note = Source of sequence: Corresponding positions on reference sequence NM_000185.4: 947-968
  source 1..21: mol_type = other RNA
gaataaattcccagtggaaat

SEQ ID NO: 100 - RNA, 21 nt, synthetic construct
  misc_feature 1..21: note = Description of origin: HCII siRNA sense strands
  misc_feature 1..21: note = Source of sequence: Corresponding positions on reference sequence NM_000185.4: 1100-1121
  source 1..21: mol_type = other RNA
gggcatcagcatgctaattgt

SEQ ID NO: 101 - RNA, 21 nt, synthetic construct
  misc_feature 1..21: note = Description of origin: HCII siRNA sense strands
  misc_feature 1..21: note = Source of sequence: Corresponding positions on reference sequence NM_000185.4: 1193-1214
  source 1..21: mol_type = other RNA
aaaaagcatgacaaacagaac

SEQ ID NO: 102 - RNA, 21 nt, synthetic construct
  misc_feature 1..21: note = Description of origin: HCII siRNA sense strands
  misc_feature 1..21: note = Source of sequence: Corresponding positions on reference sequence NM_000185.4: 771-792
  source 1..21: mol_type = other RNA
gagtattactttgctgaggcc

SEQ ID NO: 103 - RNA, 21 nt, synthetic construct
  misc_feature 1..21: note = Description of origin: ZPI siRNA sense strands
  misc_feature 1..21: note = Source of sequence: Corresponding positions on reference sequence NM_016186.3: 991-1012
  source 1..21: mol_type = other RNA
tgccttcatccacaaggattt

SEQ ID NO: 104 - RNA, 21 nt, synthetic construct
  misc_feature 1..21: note = Description of origin: ZPI siRNA sense strands
  misc_feature 1..21: note = Source of sequence: Corresponding positions on reference sequence NM_016186.3: 756-777
  source 1..21: mol_type = other RNA
tgcgaaagatctccatgaggc

SEQ ID NO: 105 - RNA, 21 nt, synthetic construct
  misc_feature 1..21: note = Description of origin: ZPI siRNA sense strands
  misc_feature 1..21: note = Source of sequence: Corresponding positions on reference sequence NM_016186.3: 1390-1411
  source 1..21: mol_type = other RNA
gctggtggtcctcatggagaa

SEQ ID NO: 106 - RNA, 21 nt, synthetic construct
  misc_feature 1..21: note = Description of origin: ZPI siRNA sense strands
  misc_feature 1..21: note = Source of sequence: Corresponding positions on reference sequence NM_016186.3: 757-778
  source 1..21: mol_type = other RNA
gcgaaagatctccatgaggca

SEQ ID NO: 107 - RNA, 21 nt, synthetic construct
  misc_feature 1..21: note = Description of origin: ZPI siRNA sense strands
  misc_feature 1..21: note = Source of sequence: Corresponding positions on reference sequence NM_016186.3: 1531-1552
  source 1..21: mol_type = other RNA
gtatgagatgcatgagctgct

SEQ ID NO: 108 - RNA, 21 nt, synthetic construct
  misc_feature 1..21: note = Description of origin: ZPI siRNA sense strands
  misc_feature 1..21: note = Source of sequence: Corresponding positions on reference sequence NM_016186.3: 1156-1177
  source 1..21: mol_type = other RNA
gtttgatgagattaatcctga

SEQ ID NO: 109 - RNA, 21 nt, synthetic construct
  misc_feature 1..21: note = Description of origin: ZPI siRNA sense strands
  misc_feature 1..21: note = Source of sequence: Corresponding positions on reference sequence NM_016186.3: 1162-1183
  source 1..21: mol_type = other RNA
tgagattaatcctgaaaccaa

SEQ ID NO: 110 - RNA, 21 nt, synthetic construct
  misc_feature 1..21: note = Description of origin: ZPI siRNA sense strands
  misc_feature 1..21: note = Source of sequence: Corresponding positions on reference sequence NM_016186.3: 1159-1180
  source 1..21: mol_type = other RNA
tgatgagattaatcctgaaac

SEQ ID NO: 111 - RNA, 21 nt, synthetic construct
  misc_feature 1..21: note = Description of origin: ZPI siRNA sense strands
  misc_feature 1..21: note = Source of sequence: Corresponding positions on reference sequence NM_016186.3: 1161-1182
  source 1..21: mol_type = other RNA
atgagattaatcctgaaacca

SEQ ID NO: 112 - RNA, 21 nt, synthetic construct
  misc_feature 1..21: note = Description of origin: ZPI siRNA sense strands
  misc_feature 1..21: note = Source of sequence: Corresponding positions on reference sequence NM_016186.3: 1160-1181
  source 1..21: mol_type = other RNA
gatgagattaatcctgaaacc

SEQ ID NO: 113 - RNA, 21 nt, synthetic construct
  misc_feature 1..21: note = Description of origin: ZPI siRNA sense strands
  misc_feature 1..21: note = Source of sequence: Corresponding positions on reference sequence NM_016186.3: 1154-1175
  source 1..21: mol_type = other RNA
ctgtttgatgagattaatcct

SEQ ID NO: 114 - RNA, 21 nt, synthetic construct
  misc_feature 1..21: note = Description of origin: ZPI siRNA sense strands
  misc_feature 1..21: note = Source of sequence: Corresponding positions on reference sequence NM_016186.3: 988-1009
  source 1..21: mol_type = other RNA
ttttgccttcatccacaagga

SEQ ID NO: 115 - RNA, 21 nt, synthetic construct
  misc_feature 1..21: note = Description of origin: ZPI siRNA sense strands
  misc_feature 1..21: note = Source of sequence: Corresponding positions on reference sequence NM_016186.3: 758-779
  source 1..21: mol_type = other RNA
cgaaagatctccatgaggcac

SEQ ID NO: 116 - RNA, 21 nt, synthetic construct
  misc_feature 1..21: note = Description of origin: ZPI siRNA sense strands
  misc_feature 1..21: note = Source of sequence: Corresponding positions on reference sequence NM_016186.3: 1389-1410
  source 1..21: mol_type = other RNA
tgctggtggtcctcatggaga

SEQ ID NO: 117 - RNA, 21 nt, synthetic construct
  misc_feature 1..21: note = Description of origin: ZPI siRNA sense strands
  misc_feature 1..21: note = Source of sequence: Corresponding positions on reference sequence NM_016186.3: 993-1014
  source 1..21: mol_type = other RNA
ccttcatccacaaggattttg

SEQ ID NO: 118 - RNA, 21 nt, synthetic construct
  misc_feature 1..21: note = Description of origin: ZPI siRNA sense strands
  misc_feature 1..21: note = Source of sequence: Corresponding positions on reference sequence NM_016186.3: 759-780
  source 1..21: mol_type = other RNA
gaaagatctccatgaggcacg

SEQ ID NO: 119 - RNA, 21 nt, synthetic construct
  misc_feature 1..21: note = Description of origin: ZPI siRNA sense strands
  misc_feature 1..21: note = Source of sequence: Corresponding positions on reference sequence NM_016186.3: 995-1016
  source 1..21: mol_type = other RNA
ttcatccacaaggattttgat

SEQ ID NO: 120 - RNA, 21 nt, synthetic construct
  misc_feature 1..21: note = Description of origin: ZPI siRNA sense strands
  misc_feature 1..21: note = Source of sequence: Corresponding positions on reference sequence NM_016186.3: 1157-1178
  source 1..21: mol_type = other RNA
tttgatgagattaatcctgaa

SEQ ID NO: 121 - RNA, 21 nt, synthetic construct
  misc_feature 1..21: note = Description of origin: ZPI siRNA sense strands
  misc_feature 1..21: note = Source of sequence: Corresponding positions on reference sequence NM_016186.3: 990-1011
  source 1..21: mol_type = other RNA
ttgccttcatccacaaggatt

SEQ ID NO: 122 - RNA, 21 nt, synthetic construct
  misc_feature 1..21: note = Description of origin: ZPI siRNA sense strands
  misc_feature 1..21: note = Source of sequence: Corresponding positions on reference sequence NM_016186.3: 763-784
  source 1..21: mol_type = other RNA
gatctccatgaggcacgatgg

SEQ ID NO: 123 - RNA, 23 nt, synthetic construct
  misc_feature 1..23: note = Description of origin: HCII siRNA antisense strands
  misc_feature 1..23: note = Description of source:Antisense strand ID:
  modified_base 1: mod_base = OTHER; note = 2'O-methyl-uridine
  modified_base 2: mod_base = OTHER; note = 2' Fluoro-uridine
  modified_base 3: mod_base = OTHER; note = 2'O-methyl-uridine
  modified_base 4: mod_base = OTHER; note = 2' Fluoro-cytidine
  modified_base 5: mod_base = OTHER; note = 2'O-methyl-cytidine
  modified_base 6: mod_base = OTHER; note = 2'Fluoro-adenosine
  modified_base 7: mod_base = OTHER; note = 2'O-methyl-cytidine
  modified_base 8: mod_base = OTHER; note = 2' Fluoro-uridine
  modified_base 9: mod_base = OTHER; note = 2' Fluoro-guanosine
  modified_base 10: mod_base = OTHER; note = 2'O-methyl-guanosine
  modified_base 11: mod_base = OTHER; note = 2'O-methyl-guanosine
  modified_base 12: mod_base = OTHER; note = 2'O-methyl-adenosine
  modified_base 13: mod_base = OTHER; note = 2'O-methyl-adenosine
  modified_base 14: mod_base = OTHER; note = 2' Fluoro-uridine
  modified_base 15: mod_base = OTHER; note = 2'O-methyl-uridine
  modified_base 16: mod_base = OTHER; note = 2' Fluoro-uridine
  modified_base 17: mod_base = OTHER; note = 2'O-methyl-adenosine
  modified_base 18: mod_base = OTHER; note = 2'O-methyl-uridine
  modified_base 19: mod_base = OTHER; note = 2'O-methyl-uridine
  modified_base 20: mod_base = OTHER; note = 2'O-methyl-cytidine
  modified_base 21: mod_base = OTHER; note = 2'O-methyl-adenosine
  modified_base 22: mod_base = OTHER; note = 2'O-methyl-cytidine
  modified_base 23: mod_base = OTHER; note = 2'O-methyl-cytidine
  modified_base 1..2: mod_base = OTHER; note = phosphorothioate linkage
  modified_base 2..3: mod_base = OTHER; note = phosphorothioate linkage
  modified_base 21..22: mod_base = OTHER; note = phosphorothioate linkage
  modified_base 22..23: mod_base = OTHER; note = phosphorothioate linkage
  source 1..23: mol_type = other RNA
tttccactgggaatttattcacc

SEQ ID NO: 124 - RNA, 23 nt, synthetic construct
  misc_feature 1..23: note = Description of origin: HCII siRNA antisense strands
  misc_feature 1..23: note = Description of source:Antisense strand ID:
  modified_base 1: mod_base = OTHER; note = 2'O-methyl-guanosine
  modified_base 2: mod_base = OTHER; note = 2'Fluoro-adenosine
  modified_base 3: mod_base = OTHER; note = 2'O-methyl-uridine
  modified_base 4: mod_base = OTHER; note = 2' Fluoro-cytidine
  modified_base 5: mod_base = OTHER; note = 2'O-methyl-cytidine
  modified_base 6: mod_base = OTHER; note = 2' Fluoro-uridine
  modified_base 7: mod_base = OTHER; note = 2'O-methyl-uridine
  modified_base 8: mod_base = OTHER; note = 2' Fluoro-uridine
  modified_base 9: mod_base = OTHER; note = 2' Fluoro-guanosine
  modified_base 10: mod_base = OTHER; note = 2'O-methyl-adenosine
  modified_base 11: mod_base = OTHER; note = 2'O-methyl-adenosine
  modified_base 12: mod_base = OTHER; note = 2'O-methyl-guanosine
  modified_base 13: mod_base = OTHER; note = 2'O-methyl-uridine
  modified_base 14: mod_base = OTHER; note = 2'Fluoro-adenosine
  modified_base 15: mod_base = OTHER; note = 2'O-methyl-guanosine
  modified_base 16: mod_base = OTHER; note = 2'Fluoro-adenosine
  modified_base 17: mod_base = OTHER; note = 2'O-methyl-uridine
  modified_base 18: mod_base = OTHER; note = 2'O-methyl-guanosine
  modified_base 19: mod_base = OTHER; note = 2'O-methyl-cytidine
  modified_base 20: mod_base = OTHER; note = 2'O-methyl-adenosine
  modified_base 21: mod_base = OTHER; note = 2'O-methyl-guanosine
  modified_base 22: mod_base = OTHER; note = 2'O-methyl-uridine
  modified_base 23: mod_base = OTHER; note = 2'O-methyl-uridine
  modified_base 1..2: mod_base = OTHER; note = phosphorothioate linkage
  modified_base 2..3: mod_base = OTHER; note = phosphorothioate linkage
  modified_base 21..22: mod_base = OTHER; note = phosphorothioate linkage
  modified_base 22..23: mod_base = OTHER; note = phosphorothioate linkage
  source 1..23: mol_type = other RNA
gatcctttgaagtagatgcagtt

SEQ ID NO: 125 - RNA, 23 nt, synthetic construct
  misc_feature 1..23: note = Description of origin: HCII siRNA antisense strands
  misc_feature 1..23: note = Description of source:Antisense strand ID:
  modified_base 1: mod_base = OTHER; note = 2'O-methyl-adenosine
  modified_base 2: mod_base = OTHER; note = 2' Fluoro-uridine
  modified_base 3: mod_base = OTHER; note = 2'O-methyl-cytidine
  modified_base 4: mod_base = OTHER; note = 2' Fluoro-cytidine
  modified_base 5: mod_base = OTHER; note = 2'O-methyl-uridine
  modified_base 6: mod_base = OTHER; note = 2' Fluoro-uridine
  modified_base 7: mod_base = OTHER; note = 2'O-methyl-uridine
  modified_base 8: mod_base = OTHER; note = 2' Fluoro-guanosine
  modified_base 9: mod_base = OTHER; note = 2'Fluoro-adenosine
  modified_base 10: mod_base = OTHER; note = 2'O-methyl-adenosine
  modified_base 11: mod_base = OTHER; note = 2'O-methyl-guanosine
  modified_base 12: mod_base = OTHER; note = 2'O-methyl-uridine
  modified_base 13: mod_base = OTHER; note = 2'O-methyl-adenosine
  modified_base 14: mod_base = OTHER; note = 2' Fluoro-guanosine
  modified_base 15: mod_base = OTHER; note = 2'O-methyl-adenosine
  modified_base 16: mod_base = OTHER; note = 2' Fluoro-uridine
  modified_base 17: mod_base = OTHER; note = 2'O-methyl-guanosine
  modified_base 18: mod_base = OTHER; note = 2'O-methyl-cytidine
  modified_base 19: mod_base = OTHER; note = 2'O-methyl-adenosine
  modified_base 20: mod_base = OTHER; note = 2'O-methyl-guanosine
  modified_base 21: mod_base = OTHER; note = 2'O-methyl-uridine
  modified_base 22: mod_base = OTHER; note = 2'O-methyl-uridine
  modified_base 23: mod_base = OTHER; note = 2'O-methyl-guanosine
  modified_base 1..2: mod_base = OTHER; note = phosphorothioate linkage
  modified_base 2..3: mod_base = OTHER; note = phosphorothioate linkage
  modified_base 21..22: mod_base = OTHER; note = phosphorothioate linkage
  modified_base 22..23: mod_base = OTHER; note = phosphorothioate linkage
  source 1..23: mol_type = other RNA
atcctttgaagtagatgcagttg

SEQ ID NO: 126 - RNA, 23 nt, synthetic construct
  misc_feature 1..23: note = Description of origin: HCII siRNA antisense strands
  misc_feature 1..23: note = Description of source:Antisense strand ID:
  modified_base 1: mod_base = OTHER; note = 2'O-methyl-adenosine
  modified_base 2: mod_base = OTHER; note = 2' Fluoro-cytidine
  modified_base 3: mod_base = OTHER; note = 2'O-methyl-uridine
  modified_base 4: mod_base = OTHER; note = 2' Fluoro-uridine
  modified_base 5: mod_base = OTHER; note = 2'O-methyl-guanosine
  modified_base 6: mod_base = OTHER; note = 2' Fluoro-uridine
  modified_base 7: mod_base = OTHER; note = 2'O-methyl-uridine
  modified_base 8: mod_base = OTHER; note = 2' Fluoro-cytidine
  modified_base 9: mod_base = OTHER; note = 2'Fluoro-adenosine
  modified_base 10: mod_base = OTHER; note = 2'O-methyl-uridine
  modified_base 11: mod_base = OTHER; note = 2'O-methyl-guanosine
  modified_base 12: mod_base = OTHER; note = 2'O-methyl-guanosine
  modified_base 13: mod_base = OTHER; note = 2'O-methyl-guanosine
  modified_base 14: mod_base = OTHER; note = 2' Fluoro-uridine
  modified_base 15: mod_base = OTHER; note = 2'O-methyl-cytidine
  modified_base 16: mod_base = OTHER; note = 2' Fluoro-uridine
  modified_base 17: mod_base = OTHER; note = 2'O-methyl-cytidine
  modified_base 18: mod_base = OTHER; note = 2'O-methyl-uridine
  modified_base 19: mod_base = OTHER; note = 2'O-methyl-cytidine
  modified_base 20: mod_base = OTHER; note = 2'O-methyl-cytidine
  modified_base 21: mod_base = OTHER; note = 2'O-methyl-cytidine
  modified_base 22: mod_base = OTHER; note = 2'O-methyl-uridine
  modified_base 23: mod_base = OTHER; note = 2'O-methyl-uridine
  modified_base 1..2: mod_base = OTHER; note = phosphorothioate linkage
  modified_base 2..3: mod_base = OTHER; note = phosphorothioate linkage
  modified_base 21..22: mod_base = OTHER; note = phosphorothioate linkage
  modified_base 22..23: mod_base = OTHER; note = phosphorothioate linkage
  source 1..23: mol_type = other RNA
acttgttcatgggtctctccctt

SEQ ID NO: 127 - RNA, 23 nt, synthetic construct
  misc_feature 1..23: note = Description of origin: HCII siRNA antisense strands
  misc_feature 1..23: note = Description of source:Antisense strand ID:
  modified_base 1: mod_base = OTHER; note = 2'O-methyl-uridine
  modified_base 2: mod_base = OTHER; note = 2' Fluoro-cytidine
  modified_base 3: mod_base = OTHER; note = 2'O-methyl-cytidine
  modified_base 4: mod_base = OTHER; note = 2'Fluoro-adenosine
  modified_base 5: mod_base = OTHER; note = 2'O-methyl-cytidine
  modified_base 6: mod_base = OTHER; note = 2' Fluoro-uridine
  modified_base 7: mod_base = OTHER; note = 2'O-methyl-guanosine
  modified_base 8: mod_base = OTHER; note = 2' Fluoro-guanosine
  modified_base 9: mod_base = OTHER; note = 2' Fluoro-guanosine
  modified_base 10: mod_base = OTHER; note = 2'O-methyl-adenosine
  modified_base 11: mod_base = OTHER; note = 2'O-methyl-adenosine
  modified_base 12: mod_base = OTHER; note = 2'O-methyl-uridine
  modified_base 13: mod_base = OTHER; note = 2'O-methyl-uridine
  modified_base 14: mod_base = OTHER; note = 2' Fluoro-uridine
  modified_base 15: mod_base = OTHER; note = 2'O-methyl-adenosine
  modified_base 16: mod_base = OTHER; note = 2' Fluoro-uridine
  modified_base 17: mod_base = OTHER; note = 2'O-methyl-uridine
  modified_base 18: mod_base = OTHER; note = 2'O-methyl-cytidine
  modified_base 19: mod_base = OTHER; note = 2'O-methyl-adenosine
  modified_base 20: mod_base = OTHER; note = 2'O-methyl-cytidine
  modified_base 21: mod_base = OTHER; note = 2'O-methyl-cytidine
  modified_base 22: mod_base = OTHER; note = 2'O-methyl-cytidine
  modified_base 23: mod_base = OTHER; note = 2'O-methyl-adenosine
  modified_base 1..2: mod_base = OTHER; note = phosphorothioate linkage
  modified_base 2..3: mod_base = OTHER; note = phosphorothioate linkage
  modified_base 21..22: mod_base = OTHER; note = phosphorothioate linkage
  modified_base 22..23: mod_base = OTHER; note = phosphorothioate linkage
  source 1..23: mol_type = other RNA
tccactgggaatttattcaccca

SEQ ID NO: 128 - RNA, 23 nt, synthetic construct
  misc_feature 1..23: note = Description of origin: HCII siRNA antisense strands
  misc_feature 1..23: note = Description of source:Antisense strand ID:
  modified_base 1: mod_base = OTHER; note = 2'O-methyl-uridine
  modified_base 2: mod_base = OTHER; note = 2' Fluoro-guanosine
  modified_base 3: mod_base = OTHER; note = 2'O-methyl-uridine
  modified_base 4: mod_base = OTHER; note = 2'Fluoro-adenosine
  modified_base 5: mod_base = OTHER; note = 2'O-methyl-cytidine
  modified_base 6: mod_base = OTHER; note = 2' Fluoro-cytidine
  modified_base 7: mod_base = OTHER; note = 2'O-methyl-cytidine
  modified_base 8: mod_base = OTHER; note = 2'Fluoro-adenosine
  modified_base 9: mod_base = OTHER; note = 2'Fluoro-adenosine
  modified_base 10: mod_base = OTHER; note = 2'O-methyl-adenosine
  modified_base 11: mod_base = OTHER; note = 2'O-methyl-adenosine
  modified_base 12: mod_base = OTHER; note = 2'O-methyl-uridine
  modified_base 13: mod_base = OTHER; note = 2'O-methyl-uridine
  modified_base 14: mod_base = OTHER; note = 2' Fluoro-cytidine
  modified_base 15: mod_base = OTHER; note = 2'O-methyl-cytidine
  modified_base 16: mod_base = OTHER; note = 2' Fluoro-uridine
  modified_base 17: mod_base = OTHER; note = 2'O-methyl-cytidine
  modified_base 18: mod_base = OTHER; note = 2'O-methyl-cytidine
  modified_base 19: mod_base = OTHER; note = 2'O-methyl-uridine
  modified_base 20: mod_base = OTHER; note = 2'O-methyl-guanosine
  modified_base 21: mod_base = OTHER; note = 2'O-methyl-adenosine
  modified_base 22: mod_base = OTHER; note = 2'O-methyl-adenosine
  modified_base 23: mod_base = OTHER; note = 2'O-methyl-guanosine
  modified_base 1..2: mod_base = OTHER; note = phosphorothioate linkage
  modified_base 2..3: mod_base = OTHER; note = phosphorothioate linkage
  modified_base 21..22: mod_base = OTHER; note = phosphorothioate linkage
  modified_base 22..23: mod_base = OTHER; note = phosphorothioate linkage
  source 1..23: mol_type = other RNA
tgtacccaaaattcctcctgaag

SEQ ID NO: 129 - RNA, 23 nt, synthetic construct
  misc_feature 1..23: note = Description of origin: HCII siRNA antisense strands
  misc_feature 1..23: note = Description of source:Antisense strand ID:
  modified_base 1: mod_base = OTHER; note = 2'O-methyl-uridine
  modified_base 2: mod_base = OTHER; note = 2' Fluoro-uridine
  modified_base 3: mod_base = OTHER; note = 2'O-methyl-cytidine
  modified_base 4: mod_base = OTHER; note = 2' Fluoro-cytidine
  modified_base 5: mod_base = OTHER; note = 2'O-methyl-cytidine
  modified_base 6: mod_base = OTHER; note = 2'Fluoro-adenosine
  modified_base 7: mod_base = OTHER; note = 2'O-methyl-uridine
  modified_base 8: mod_base = OTHER; note = 2' Fluoro-guanosine
  modified_base 9: mod_base = OTHER; note = 2'Fluoro-adenosine
  modified_base 10: mod_base = OTHER; note = 2'O-methyl-adenosine
  modified_base 11: mod_base = OTHER; note = 2'O-methyl-guanosine
  modified_base 12: mod_base = OTHER; note = 2'O-methyl-adenosine
  modified_base 13: mod_base = OTHER; note = 2'O-methyl-guanosine
  modified_base 14: mod_base = OTHER; note = 2' Fluoro-cytidine
  modified_base 15: mod_base = OTHER; note = 2'O-methyl-adenosine
  modified_base 16: mod_base = OTHER; note = 2' Fluoro-guanosine
  modified_base 17: mod_base = OTHER; note = 2'O-methyl-guanosine
  modified_base 18: mod_base = OTHER; note = 2'O-methyl-cytidine
  modified_base 19: mod_base = OTHER; note = 2'O-methyl-adenosine
  modified_base 20: mod_base = OTHER; note = 2'O-methyl-guanosine
  modified_base 21: mod_base = OTHER; note = 2'O-methyl-cytidine
  modified_base 22: mod_base = OTHER; note = 2'O-methyl-uridine
  modified_base 23: mod_base = OTHER; note = 2'O-methyl-guanosine
  modified_base 1..2: mod_base = OTHER; note = phosphorothioate linkage
  modified_base 2..3: mod_base = OTHER; note = phosphorothioate linkage
  modified_base 21..22: mod_base = OTHER; note = phosphorothioate linkage
  modified_base 22..23: mod_base = OTHER; note = phosphorothioate linkage
  source 1..23: mol_type = other RNA
ttcccatgaagagcaggcagctg

SEQ ID NO: 130 - RNA, 23 nt, synthetic construct
  misc_feature 1..23: note = Description of origin: HCII siRNA antisense strands
  misc_feature 1..23: note = Description of source:Antisense strand ID:
  modified_base 1: mod_base = OTHER; note = 2'O-methyl-uridine
  modified_base 2: mod_base = OTHER; note = 2' Fluoro-cytidine
  modified_base 3: mod_base = OTHER; note = 2'O-methyl-uridine
  modified_base 4: mod_base = OTHER; note = 2' Fluoro-uridine
  modified_base 5: mod_base = OTHER; note = 2'O-methyl-uridine
  modified_base 6: mod_base = OTHER; note = 2' Fluoro-uridine
  modified_base 7: mod_base = OTHER; note = 2'O-methyl-adenosine
  modified_base 8: mod_base = OTHER; note = 2' Fluoro-uridine
  modified_base 9: mod_base = OTHER; note = 2' Fluoro-guanosine
  modified_base 10: mod_base = OTHER; note = 2'O-methyl-adenosine
  modified_base 11: mod_base = OTHER; note = 2'O-methyl-guanosine
  modified_base 12: mod_base = OTHER; note = 2'O-methyl-guanosine
  modified_base 13: mod_base = OTHER; note = 2'O-methyl-cytidine
  modified_base 14: mod_base = OTHER; note = 2' Fluoro-cytidine
  modified_base 15: mod_base = OTHER; note = 2'O-methyl-cytidine
  modified_base 16: mod_base = OTHER; note = 2' Fluoro-uridine
  modified_base 17: mod_base = OTHER; note = 2'O-methyl-uridine
  modified_base 18: mod_base = OTHER; note = 2'O-methyl-guanosine
  modified_base 19: mod_base = OTHER; note = 2'O-methyl-guanosine
  modified_base 20: mod_base = OTHER; note = 2'O-methyl-uridine
  modified_base 21: mod_base = OTHER; note = 2'O-methyl-guanosine
  modified_base 22: mod_base = OTHER; note = 2'O-methyl-adenosine
  modified_base 23: mod_base = OTHER; note = 2'O-methyl-guanosine
  modified_base 1..2: mod_base = OTHER; note = phosphorothioate linkage
  modified_base 2..3: mod_base = OTHER; note = phosphorothioate linkage
  modified_base 21..22: mod_base = OTHER; note = phosphorothioate linkage
  modified_base 22..23: mod_base = OTHER; note = phosphorothioate linkage
  source 1..23: mol_type = other RNA
tcttttatgaggcccttggtgag

SEQ ID NO: 131 - RNA, 23 nt, synthetic construct
  misc_feature 1..23: note = Description of origin: HCII siRNA antisense strands
  misc_feature 1..23: note = Description of source:Antisense strand ID:
  modified_base 1: mod_base = OTHER; note = 2'O-methyl-adenosine
  modified_base 2: mod_base = OTHER; note = 2'Fluoro-adenosine
  modified_base 3: mod_base = OTHER; note = 2'O-methyl-cytidine
  modified_base 4: mod_base = OTHER; note = 2' Fluoro-uridine
  modified_base 5: mod_base = OTHER; note = 2'O-methyl-guanosine
  modified_base 6: mod_base = OTHER; note = 2' Fluoro-cytidine
  modified_base 7: mod_base = OTHER; note = 2'O-methyl-uridine
  modified_base 8: mod_base = OTHER; note = 2' Fluoro-uridine
  modified_base 9: mod_base = OTHER; note = 2' Fluoro-cytidine
  modified_base 10: mod_base = OTHER; note = 2'O-methyl-uridine
  modified_base 11: mod_base = OTHER; note = 2'O-methyl-guanosine
  modified_base 12: mod_base = OTHER; note = 2'O-methyl-guanosine
  modified_base 13: mod_base = OTHER; note = 2'O-methyl-adenosine
  modified_base 14: mod_base = OTHER; note = 2' Fluoro-uridine
  modified_base 15: mod_base = OTHER; note = 2'O-methyl-adenosine
  modified_base 16: mod_base = OTHER; note = 2' Fluoro-uridine
  modified_base 17: mod_base = OTHER; note = 2'O-methyl-adenosine
  modified_base 18: mod_base = OTHER; note = 2'O-methyl-adenosine
  modified_base 19: mod_base = OTHER; note = 2'O-methyl-adenosine
  modified_base 20: mod_base = OTHER; note = 2'O-methyl-guanosine
  modified_base 21: mod_base = OTHER; note = 2'O-methyl-guanosine
  modified_base 22: mod_base = OTHER; note = 2'O-methyl-uridine
  modified_base 23: mod_base = OTHER; note = 2'O-methyl-cytidine
  modified_base 1..2: mod_base = OTHER; note = phosphorothioate linkage
  modified_base 2..3: mod_base = OTHER; note = phosphorothioate linkage
  modified_base 21..22: mod_base = OTHER; note = phosphorothioate linkage
  modified_base 22..23: mod_base = OTHER; note = phosphorothioate linkage
  source 1..23: mol_type = other RNA
aactgcttctggatataaaggtc

SEQ ID NO: 132 - RNA, 23 nt, synthetic construct
  misc_feature 1..23: note = Description of origin: HCII siRNA antisense strands
  misc_feature 1..23: note = Description of source:Antisense strand ID:
  modified_base 1: mod_base = OTHER; note = 2'O-methyl-cytidine
  modified_base 2: mod_base = OTHER; note = 2' Fluoro-cytidine
  modified_base 3: mod_base = OTHER; note = 2'O-methyl-uridine
  modified_base 4: mod_base = OTHER; note = 2' Fluoro-uridine
  modified_base 5: mod_base = OTHER; note = 2'O-methyl-uridine
  modified_base 6: mod_base = OTHER; note = 2' Fluoro-guanosine
  modified_base 7: mod_base = OTHER; note = 2'O-methyl-adenosine
  modified_base 8: mod_base = OTHER; note = 2'Fluoro-adenosine
  modified_base 9: mod_base = OTHER; note = 2' Fluoro-guanosine
  modified_base 10: mod_base = OTHER; note = 2'O-methyl-uridine
  modified_base 11: mod_base = OTHER; note = 2'O-methyl-adenosine
  modified_base 12: mod_base = OTHER; note = 2'O-methyl-guanosine
  modified_base 13: mod_base = OTHER; note = 2'O-methyl-adenosine
  modified_base 14: mod_base = OTHER; note = 2' Fluoro-uridine
  modified_base 15: mod_base = OTHER; note = 2'O-methyl-guanosine
  modified_base 16: mod_base = OTHER; note = 2' Fluoro-cytidine
  modified_base 17: mod_base = OTHER; note = 2'O-methyl-adenosine
  modified_base 18: mod_base = OTHER; note = 2'O-methyl-guanosine
  modified_base 19: mod_base = OTHER; note = 2'O-methyl-uridine
  modified_base 20: mod_base = OTHER; note = 2'O-methyl-uridine
  modified_base 21: mod_base = OTHER; note = 2'O-methyl-guanosine
  modified_base 22: mod_base = OTHER; note = 2'O-methyl-adenosine
  modified_base 23: mod_base = OTHER; note = 2'O-methyl-guanosine
  modified_base 1..2: mod_base = OTHER; note = phosphorothioate linkage
  modified_base 2..3: mod_base = OTHER; note = phosphorothioate linkage
  modified_base 21..22: mod_base = OTHER; note = phosphorothioate linkage
  modified_base 22..23: mod_base = OTHER; note = phosphorothioate linkage
  source 1..23: mol_type = other RNA
cctttgaagtagatgcagttgag

SEQ ID NO: 133 - RNA, 23 nt, synthetic construct
  misc_feature 1..23: note = Description of origin: HCII siRNA antisense strands
  misc_feature 1..23: note = Description of source:Antisense strand ID:
  modified_base 1: mod_base = OTHER; note = 2'O-methyl-uridine
  modified_base 2: mod_base = OTHER; note = 2' Fluoro-uridine
  modified_base 3: mod_base = OTHER; note = 2'O-methyl-adenosine
  modified_base 4: mod_base = OTHER; note = 2'Fluoro-adenosine
  modified_base 5: mod_base = OTHER; note = 2'O-methyl-guanosine
  modified_base 6: mod_base = OTHER; note = 2'Fluoro-adenosine
  modified_base 7: mod_base = OTHER; note = 2'O-methyl-cytidine
  modified_base 8: mod_base = OTHER; note = 2' Fluoro-guanosine
  modified_base 9: mod_base = OTHER; note = 2' Fluoro-cytidine
  modified_base 10: mod_base = OTHER; note = 2'O-methyl-uridine
  modified_base 11: mod_base = OTHER; note = 2'O-methyl-guanosine
  modified_base 12: mod_base = OTHER; note = 2'O-methyl-guanosine
  modified_base 13: mod_base = OTHER; note = 2'O-methyl-adenosine
  modified_base 14: mod_base = OTHER; note = 2' Fluoro-uridine
  modified_base 15: mod_base = OTHER; note = 2'O-methyl-cytidine
  modified_base 16: mod_base = OTHER; note = 2' Fluoro-cytidine
  modified_base 17: mod_base = OTHER; note = 2'O-methyl-guanosine
  modified_base 18: mod_base = OTHER; note = 2'O-methyl-guanosine
  modified_base 19: mod_base = OTHER; note = 2'O-methyl-cytidine
  modified_base 20: mod_base = OTHER; note = 2'O-methyl-uridine
  modified_base 21: mod_base = OTHER; note = 2'O-methyl-cytidine
  modified_base 22: mod_base = OTHER; note = 2'O-methyl-uridine
  modified_base 23: mod_base = OTHER; note = 2'O-methyl-uridine
  modified_base 1..2: mod_base = OTHER; note = phosphorothioate linkage
  modified_base 2..3: mod_base = OTHER; note = phosphorothioate linkage
  modified_base 21..22: mod_base = OTHER; note = phosphorothioate linkage
  modified_base 22..23: mod_base = OTHER; note = phosphorothioate linkage
  source 1..23: mol_type = other RNA
ttaagacgctggatccggctctt

SEQ ID NO: 134 - RNA, 23 nt, synthetic construct
  misc_feature 1..23: note = Description of origin: HCII siRNA antisense strands
  misc_feature 1..23: note = Description of source:Antisense strand ID:
  modified_base 1: mod_base = OTHER; note = 2'O-methyl-guanosine
  modified_base 2: mod_base = OTHER; note = 2'Fluoro-adenosine
  modified_base 3: mod_base = OTHER; note = 2'O-methyl-guanosine
  modified_base 4: mod_base = OTHER; note = 2' Fluoro-guanosine
  modified_base 5: mod_base = OTHER; note = 2'O-methyl-adenosine
  modified_base 6: mod_base = OTHER; note = 2' Fluoro-uridine
  modified_base 7: mod_base = OTHER; note = 2'O-methyl-guanosine
  modified_base 8: mod_base = OTHER; note = 2' Fluoro-uridine
  modified_base 9: mod_base = OTHER; note = 2' Fluoro-uridine
  modified_base 10: mod_base = OTHER; note = 2'O-methyl-adenosine
  modified_base 11: mod_base = OTHER; note = 2'O-methyl-adenosine
  modified_base 12: mod_base = OTHER; note = 2'O-methyl-guanosine
  modified_base 13: mod_base = OTHER; note = 2'O-methyl-adenosine
  modified_base 14: mod_base = OTHER; note = 2' Fluoro-cytidine
  modified_base 15: mod_base = OTHER; note = 2'O-methyl-guanosine
  modified_base 16: mod_base = OTHER; note = 2' Fluoro-cytidine
  modified_base 17: mod_base = OTHER; note = 2'O-methyl-uridine
  modified_base 18: mod_base = OTHER; note = 2'O-methyl-guanosine
  modified_base 19: mod_base = OTHER; note = 2'O-methyl-guanosine
  modified_base 20: mod_base = OTHER; note = 2'O-methyl-adenosine
  modified_base 21: mod_base = OTHER; note = 2'O-methyl-uridine
  modified_base 22: mod_base = OTHER; note = 2'O-methyl-cytidine
  modified_base 23: mod_base = OTHER; note = 2'O-methyl-cytidine
  modified_base 1..2: mod_base = OTHER; note = phosphorothioate linkage
  modified_base 2..3: mod_base = OTHER; note = phosphorothioate linkage
  modified_base 21..22: mod_base = OTHER; note = phosphorothioate linkage
  modified_base 22..23: mod_base = OTHER; note = phosphorothioate linkage
  source 1..23: mol_type = other RNA
gaggatgttaagacgctggatcc

SEQ ID NO: 135 - RNA, 23 nt, synthetic construct
  misc_feature 1..23: note = Description of origin: HCII siRNA antisense strands
  misc_feature 1..23: note = Description of source:Antisense strand ID:
  modified_base 1: mod_base = OTHER; note = 2'O-methyl-uridine
  modified_base 2: mod_base = OTHER; note = 2' Fluoro-cytidine
  modified_base 3: mod_base = OTHER; note = 2'O-methyl-uridine
  modified_base 4: mod_base = OTHER; note = 2' Fluoro-guanosine
  modified_base 5: mod_base = OTHER; note = 2'O-methyl-uridine
  modified_base 6: mod_base = OTHER; note = 2' Fluoro-uridine
  modified_base 7: mod_base = OTHER; note = 2'O-methyl-uridine
  modified_base 8: mod_base = OTHER; note = 2' Fluoro-guanosine
  modified_base 9: mod_base = OTHER; note = 2' Fluoro-uridine
  modified_base 10: mod_base = OTHER; note = 2'O-methyl-cytidine
  modified_base 11: mod_base = OTHER; note = 2'O-methyl-adenosine
  modified_base 12: mod_base = OTHER; note = 2'O-methyl-uridine
  modified_base 13: mod_base = OTHER; note = 2'O-methyl-guanosine
  modified_base 14: mod_base = OTHER; note = 2' Fluoro-cytidine
  modified_base 15: mod_base = OTHER; note = 2'O-methyl-uridine
  modified_base 16: mod_base = OTHER; note = 2' Fluoro-uridine
  modified_base 17: mod_base = OTHER; note = 2'O-methyl-uridine
  modified_base 18: mod_base = OTHER; note = 2'O-methyl-uridine
  modified_base 19: mod_base = OTHER; note = 2'O-methyl-uridine
  modified_base 20: mod_base = OTHER; note = 2'O-methyl-uridine
  modified_base 21: mod_base = OTHER; note = 2'O-methyl-guanosine
  modified_base 22: mod_base = OTHER; note = 2'O-methyl-cytidine
  modified_base 23: mod_base = OTHER; note = 2'O-methyl-cytidine
  modified_base 1..2: mod_base = OTHER; note = phosphorothioate linkage
  modified_base 2..3: mod_base = OTHER; note = phosphorothioate linkage
  modified_base 21..22: mod_base = OTHER; note = phosphorothioate linkage
  modified_base 22..23: mod_base = OTHER; note = phosphorothioate linkage
  source 1..23: mol_type = other RNA
tctgtttgtcatgcttttttgcc

SEQ ID NO: 136 - RNA, 23 nt, synthetic construct
  misc_feature 1..23: note = Description of origin: HCII siRNA antisense strands
  misc_feature 1..23: note = Description of source:Antisense strand ID:
  modified_base 1: mod_base = OTHER; note = 2'O-methyl-guanosine
  modified_base 2: mod_base = OTHER; note = 2' Fluoro-uridine
  modified_base 3: mod_base = OTHER; note = 2'O-methyl-guanosine
  modified_base 4: mod_base = OTHER; note = 2' Fluoro-uridine
  modified_base 5: mod_base = OTHER; note = 2'O-methyl-adenosine
  modified_base 6: mod_base = OTHER; note = 2' Fluoro-cytidine
  modified_base 7: mod_base = OTHER; note = 2'O-methyl-cytidine
  modified_base 8: mod_base = OTHER; note = 2' Fluoro-cytidine
  modified_base 9: mod_base = OTHER; note = 2'Fluoro-adenosine
  modified_base 10: mod_base = OTHER; note = 2'O-methyl-adenosine
  modified_base 11: mod_base = OTHER; note = 2'O-methyl-adenosine
  modified_base 12: mod_base = OTHER; note = 2'O-methyl-adenosine
  modified_base 13: mod_base = OTHER; note = 2'O-methyl-uridine
  modified_base 14: mod_base = OTHER; note = 2' Fluoro-uridine
  modified_base 15: mod_base = OTHER; note = 2'O-methyl-cytidine
  modified_base 16: mod_base = OTHER; note = 2' Fluoro-cytidine
  modified_base 17: mod_base = OTHER; note = 2'O-methyl-uridine
  modified_base 18: mod_base = OTHER; note = 2'O-methyl-cytidine
  modified_base 19: mod_base = OTHER; note = 2'O-methyl-cytidine
  modified_base 20: mod_base = OTHER; note = 2'O-methyl-uridine
  modified_base 21: mod_base = OTHER; note = 2'O-methyl-guanosine
  modified_base 22: mod_base = OTHER; note = 2'O-methyl-adenosine
  modified_base 23: mod_base = OTHER; note = 2'O-methyl-adenosine
  modified_base 1..2: mod_base = OTHER; note = phosphorothioate linkage
  modified_base 2..3: mod_base = OTHER; note = phosphorothioate linkage
  modified_base 21..22: mod_base = OTHER; note = phosphorothioate linkage
  modified_base 22..23: mod_base = OTHER; note = phosphorothioate linkage
  source 1..23: mol_type = other RNA
gtgtacccaaaattcctcctgaa

SEQ ID NO: 137 - RNA, 23 nt, synthetic construct
  misc_feature 1..23: note = Description of origin: HCII siRNA antisense strands
  misc_feature 1..23: note = Description of source:Antisense strand ID:
  modified_base 1: mod_base = OTHER; note = 2'O-methyl-uridine
  modified_base 2: mod_base = OTHER; note = 2' Fluoro-uridine
  modified_base 3: mod_base = OTHER; note = 2'O-methyl-cytidine
  modified_base 4: mod_base = OTHER; note = 2'Fluoro-adenosine
  modified_base 5: mod_base = OTHER; note = 2'O-methyl-guanosine
  modified_base 6: mod_base = OTHER; note = 2' Fluoro-cytidine
  modified_base 7: mod_base = OTHER; note = 2'O-methyl-cytidine
  modified_base 8: mod_base = OTHER; note = 2' Fluoro-guanosine
  modified_base 9: mod_base = OTHER; note = 2' Fluoro-guanosine
  modified_base 10: mod_base = OTHER; note = 2'O-methyl-adenosine
  modified_base 11: mod_base = OTHER; note = 2'O-methyl-adenosine
  modified_base 12: mod_base = OTHER; note = 2'O-methyl-guanosine
  modified_base 13: mod_base = OTHER; note = 2'O-methyl-uridine
  modified_base 14: mod_base = OTHER; note = 2' Fluoro-uridine
  modified_base 15: mod_base = OTHER; note = 2'O-methyl-guanosine
  modified_base 16: mod_base = OTHER; note = 2' Fluoro-uridine
  modified_base 17: mod_base = OTHER; note = 2'O-methyl-guanosine
  modified_base 18: mod_base = OTHER; note = 2'O-methyl-guanosine
  modified_base 19: mod_base = OTHER; note = 2'O-methyl-uridine
  modified_base 20: mod_base = OTHER; note = 2'O-methyl-uridine
  modified_base 21: mod_base = OTHER; note = 2'O-methyl-guanosine
  modified_base 22: mod_base = OTHER; note = 2'O-methyl-uridine
  modified_base 23: mod_base = OTHER; note = 2'O-methyl-guanosine
  modified_base 1..2: mod_base = OTHER; note = phosphorothioate linkage
  modified_base 2..3: mod_base = OTHER; note = phosphorothioate linkage
  modified_base 21..22: mod_base = OTHER; note = phosphorothioate linkage
  modified_base 22..23: mod_base = OTHER; note = phosphorothioate linkage
  source 1..23: mol_type = other RNA
ttcagccggaagttgtggttgtg

SEQ ID NO: 138 - RNA, 23 nt, synthetic construct
  misc_feature 1..23: note = Description of origin: HCII siRNA antisense strands
  misc_feature 1..23: note = Description of source:Antisense strand ID:
  modified_base 1: mod_base = OTHER; note = 2'O-methyl-uridine
  modified_base 2: mod_base = OTHER; note = 2' Fluoro-guanosine
  modified_base 3: mod_base = OTHER; note = 2'O-methyl-uridine
  modified_base 4: mod_base = OTHER; note = 2' Fluoro-uridine
  modified_base 5: mod_base = OTHER; note = 2'O-methyl-uridine
  modified_base 6: mod_base = OTHER; note = 2' Fluoro-guanosine
  modified_base 7: mod_base = OTHER; note = 2'O-methyl-uridine
  modified_base 8: mod_base = OTHER; note = 2' Fluoro-cytidine
  modified_base 9: mod_base = OTHER; note = 2'Fluoro-adenosine
  modified_base 10: mod_base = OTHER; note = 2'O-methyl-uridine
  modified_base 11: mod_base = OTHER; note = 2'O-methyl-guanosine
  modified_base 12: mod_base = OTHER; note = 2'O-methyl-cytidine
  modified_base 13: mod_base = OTHER; note = 2'O-methyl-uridine
  modified_base 14: mod_base = OTHER; note = 2' Fluoro-uridine
  modified_base 15: mod_base = OTHER; note = 2'O-methyl-uridine
  modified_base 16: mod_base = OTHER; note = 2' Fluoro-uridine
  modified_base 17: mod_base = OTHER; note = 2'O-methyl-uridine
  modified_base 18: mod_base = OTHER; note = 2'O-methyl-uridine
  modified_base 19: mod_base = OTHER; note = 2'O-methyl-guanosine
  modified_base 20: mod_base = OTHER; note = 2'O-methyl-cytidine
  modified_base 21: mod_base = OTHER; note = 2'O-methyl-cytidine
  modified_base 22: mod_base = OTHER; note = 2'O-methyl-adenosine
  modified_base 23: mod_base = OTHER; note = 2'O-methyl-uridine
  modified_base 1..2: mod_base = OTHER; note = phosphorothioate linkage
  modified_base 2..3: mod_base = OTHER; note = phosphorothioate linkage
  modified_base 21..22: mod_base = OTHER; note = phosphorothioate linkage
  modified_base 22..23: mod_base = OTHER; note = phosphorothioate linkage
  source 1..23: mol_type = other RNA
tgtttgtcatgcttttttgccat

SEQ ID NO: 139 - RNA, 23 nt, synthetic construct
  misc_feature 1..23: note = Description of origin: HCII siRNA antisense strands
  misc_feature 1..23: note = Description of source:Antisense strand ID:
  modified_base 1: mod_base = OTHER; note = 2'O-methyl-adenosine
  modified_base 2: mod_base = OTHER; note = 2' Fluoro-uridine
  modified_base 3: mod_base = OTHER; note = 2'O-methyl-uridine
  modified_base 4: mod_base = OTHER; note = 2' Fluoro-uridine
  modified_base 5: mod_base = OTHER; note = 2'O-methyl-cytidine
  modified_base 6: mod_base = OTHER; note = 2' Fluoro-cytidine
  modified_base 7: mod_base = OTHER; note = 2'O-methyl-adenosine
  modified_base 8: mod_base = OTHER; note = 2' Fluoro-cytidine
  modified_base 9: mod_base = OTHER; note = 2' Fluoro-uridine
  modified_base 10: mod_base = OTHER; note = 2'O-methyl-guanosine
  modified_base 11: mod_base = OTHER; note = 2'O-methyl-guanosine
  modified_base 12: mod_base = OTHER; note = 2'O-methyl-guanosine
  modified_base 13: mod_base = OTHER; note = 2'O-methyl-adenosine
  modified_base 14: mod_base = OTHER; note = 2'Fluoro-adenosine
  modified_base 15: mod_base = OTHER; note = 2'O-methyl-uridine
  modified_base 16: mod_base = OTHER; note = 2' Fluoro-uridine
  modified_base 17: mod_base = OTHER; note = 2'O-methyl-uridine
  modified_base 18: mod_base = OTHER; note = 2'O-methyl-adenosine
  modified_base 19: mod_base = OTHER; note = 2'O-methyl-uridine
  modified_base 20: mod_base = OTHER; note = 2'O-methyl-uridine
  modified_base 21: mod_base = OTHER; note = 2'O-methyl-cytidine
  modified_base 22: mod_base = OTHER; note = 2'O-methyl-adenosine
  modified_base 23: mod_base = OTHER; note = 2'O-methyl-cytidine
  modified_base 1..2: mod_base = OTHER; note = phosphorothioate linkage
  modified_base 2..3: mod_base = OTHER; note = phosphorothioate linkage
  modified_base 21..22: mod_base = OTHER; note = phosphorothioate linkage
  modified_base 22..23: mod_base = OTHER; note = phosphorothioate linkage
  source 1..23: mol_type = other RNA
atttccactgggaatttattcac

SEQ ID NO: 140 - RNA, 23 nt, synthetic construct
  misc_feature 1..23: note = Description of origin: HCII siRNA antisense strands
  misc_feature 1..23: note = Description of source:Antisense strand ID:
  modified_base 1: mod_base = OTHER; note = 2'O-methyl-adenosine
  modified_base 2: mod_base = OTHER; note = 2' Fluoro-cytidine
  modified_base 3: mod_base = OTHER; note = 2'O-methyl-adenosine
  modified_base 4: mod_base = OTHER; note = 2'Fluoro-adenosine
  modified_base 5: mod_base = OTHER; note = 2'O-methyl-uridine
  modified_base 6: mod_base = OTHER; note = 2' Fluoro-uridine
  modified_base 7: mod_base = OTHER; note = 2'O-methyl-adenosine
  modified_base 8: mod_base = OTHER; note = 2' Fluoro-guanosine
  modified_base 9: mod_base = OTHER; note = 2' Fluoro-cytidine
  modified_base 10: mod_base = OTHER; note = 2'O-methyl-adenosine
  modified_base 11: mod_base = OTHER; note = 2'O-methyl-uridine
  modified_base 12: mod_base = OTHER; note = 2'O-methyl-guanosine
  modified_base 13: mod_base = OTHER; note = 2'O-methyl-cytidine
  modified_base 14: mod_base = OTHER; note = 2' Fluoro-uridine
  modified_base 15: mod_base = OTHER; note = 2'O-methyl-guanosine
  modified_base 16: mod_base = OTHER; note = 2'Fluoro-adenosine
  modified_base 17: mod_base = OTHER; note = 2'O-methyl-uridine
  modified_base 18: mod_base = OTHER; note = 2'O-methyl-guanosine
  modified_base 19: mod_base = OTHER; note = 2'O-methyl-cytidine
  modified_base 20: mod_base = OTHER; note = 2'O-methyl-cytidine
  modified_base 21: mod_base = OTHER; note = 2'O-methyl-cytidine
  modified_base 22: mod_base = OTHER; note = 2'O-methyl-cytidine
  modified_base 23: mod_base = OTHER; note = 2'O-methyl-cytidine
  modified_base 1..2: mod_base = OTHER; note = phosphorothioate linkage
  modified_base 2..3: mod_base = OTHER; note = phosphorothioate linkage
  modified_base 21..22: mod_base = OTHER; note = phosphorothioate linkage
  modified_base 22..23: mod_base = OTHER; note = phosphorothioate linkage
  source 1..23: mol_type = other RNA
acaattagcatgctgatgccccc

SEQ ID NO: 141 - RNA, 23 nt, synthetic construct
  misc_feature 1..23: note = Description of origin: HCII siRNA antisense strands
  misc_feature 1..23: note = Description of source:Antisense strand ID:
  modified_base 1: mod_base = OTHER; note = 2'O-methyl-guanosine
  modified_base 2: mod_base = OTHER; note = 2' Fluoro-uridine
  modified_base 3: mod_base = OTHER; note = 2'O-methyl-uridine
  modified_base 4: mod_base = OTHER; note = 2' Fluoro-cytidine
  modified_base 5: mod_base = OTHER; note = 2'O-methyl-uridine
  modified_base 6: mod_base = OTHER; note = 2' Fluoro-guanosine
  modified_base 7: mod_base = OTHER; note = 2'O-methyl-uridine
  modified_base 8: mod_base = OTHER; note = 2' Fluoro-uridine
  modified_base 9: mod_base = OTHER; note = 2' Fluoro-uridine
  modified_base 10: mod_base = OTHER; note = 2'O-methyl-guanosine
  modified_base 11: mod_base = OTHER; note = 2'O-methyl-uridine
  modified_base 12: mod_base = OTHER; note = 2'O-methyl-cytidine
  modified_base 13: mod_base = OTHER; note = 2'O-methyl-adenosine
  modified_base 14: mod_base = OTHER; note = 2' Fluoro-uridine
  modified_base 15: mod_base = OTHER; note = 2'O-methyl-guanosine
  modified_base 16: mod_base = OTHER; note = 2' Fluoro-cytidine
  modified_base 17: mod_base = OTHER; note = 2'O-methyl-uridine
  modified_base 18: mod_base = OTHER; note = 2'O-methyl-uridine
  modified_base 19: mod_base = OTHER; note = 2'O-methyl-uridine
  modified_base 20: mod_base = OTHER; note = 2'O-methyl-uridine
  modified_base 21: mod_base = OTHER; note = 2'O-methyl-uridine
  modified_base 22: mod_base = OTHER; note = 2'O-methyl-uridine
  modified_base 23: mod_base = OTHER; note = 2'O-methyl-guanosine
  modified_base 1..2: mod_base = OTHER; note = phosphorothioate linkage
  modified_base 2..3: mod_base = OTHER; note = phosphorothioate linkage
  modified_base 21..22: mod_base = OTHER; note = phosphorothioate linkage
  modified_base 22..23: mod_base = OTHER; note = phosphorothioate linkage
  source 1..23: mol_type = other RNA
gttctgtttgtcatgcttttttg

SEQ ID NO: 142 - RNA, 23 nt, synthetic construct
  misc_feature 1..23: note = Description of origin: HCII siRNA antisense strands
  misc_feature 1..23: note = Description of source:Antisense strand ID:
  modified_base 1: mod_base = OTHER; note = 2'O-methyl-guanosine
  modified_base 2: mod_base = OTHER; note = 2' Fluoro-guanosine
  modified_base 3: mod_base = OTHER; note = 2'O-methyl-cytidine
  modified_base 4: mod_base = OTHER; note = 2' Fluoro-cytidine
  modified_base 5: mod_base = OTHER; note = 2'O-methyl-uridine
  modified_base 6: mod_base = OTHER; note = 2' Fluoro-cytidine
  modified_base 7: mod_base = OTHER; note = 2'O-methyl-adenosine
  modified_base 8: mod_base = OTHER; note = 2' Fluoro-guanosine
  modified_base 9: mod_base = OTHER; note = 2' Fluoro-cytidine
  modified_base 10: mod_base = OTHER; note = 2'O-methyl-adenosine
  modified_base 11: mod_base = OTHER; note = 2'O-methyl-adenosine
  modified_base 12: mod_base = OTHER; note = 2'O-methyl-adenosine
  modified_base 13: mod_base = OTHER; note = 2'O-methyl-guanosine
  modified_base 14: mod_base = OTHER; note = 2' Fluoro-uridine
  modified_base 15: mod_base = OTHER; note = 2'O-methyl-adenosine
  modified_base 16: mod_base = OTHER; note = 2'Fluoro-adenosine
  modified_base 17: mod_base = OTHER; note = 2'O-methyl-uridine
  modified_base 18: mod_base = OTHER; note = 2'O-methyl-adenosine
  modified_base 19: mod_base = OTHER; note = 2'O-methyl-cytidine
  modified_base 20: mod_base = OTHER; note = 2'O-methyl-uridine
  modified_base 21: mod_base = OTHER; note = 2'O-methyl-cytidine
  modified_base 22: mod_base = OTHER; note = 2'O-methyl-uridine
  modified_base 23: mod_base = OTHER; note = 2'O-methyl-cytidine
  modified_base 1..2: mod_base = OTHER; note = phosphorothioate linkage
  modified_base 2..3: mod_base = OTHER; note = phosphorothioate linkage
  modified_base 21..22: mod_base = OTHER; note = phosphorothioate linkage
  modified_base 22..23: mod_base = OTHER; note = phosphorothioate linkage
  source 1..23: mol_type = other RNA
ggcctcagcaaagtaatactctc

SEQ ID NO: 143 - RNA, 23 nt, synthetic construct
  misc_feature 1..23: note = Description of origin: HCII siRNA antisense strands
  misc_feature 1..23: note = Description of source:Antisense strand ID:
  modified_base 1: mod_base = OTHER; note = 2'O-methyl-uridine
  modified_base 2: mod_base = OTHER; note = 2' Fluoro-uridine
  modified_base 3: mod_base = OTHER; note = 2'O-methyl-uridine
  modified_base 4: mod_base = OTHER; note = 2' Fluoro-cytidine
  modified_base 5: mod_base = OTHER; note = 2'O-methyl-cytidine
  modified_base 6: mod_base = OTHER; note = 2'Fluoro-adenosine
  modified_base 7: mod_base = OTHER; note = 2'O-methyl-cytidine
  modified_base 8: mod_base = OTHER; note = 2' Fluoro-uridine
  modified_base 9: mod_base = OTHER; note = 2' Fluoro-guanosine
  modified_base 10: mod_base = OTHER; note = 2'O-methyl-guanosine
  modified_base 11: mod_base = OTHER; note = 2'O-methyl-guanosine
  modified_base 12: mod_base = OTHER; note = 2'O-methyl-adenosine
  modified_base 13: mod_base = OTHER; note = 2'O-methyl-adenosine
  modified_base 14: mod_base = OTHER; note = 2' Fluoro-uridine
  modified_base 15: mod_base = OTHER; note = 2'O-methyl-uridine
  modified_base 16: mod_base = OTHER; note = 2' Fluoro-uridine
  modified_base 17: mod_base = OTHER; note = 2'O-methyl-adenosine
  modified_base 18: mod_base = OTHER; note = 2'O-methyl-uridine
  modified_base 19: mod_base = OTHER; note = 2'O-methyl-uridine
  modified_base 20: mod_base = OTHER; note = 2'O-methyl-cytidine
  modified_base 21: mod_base = OTHER; note = 2'O-methyl-adenosine
  modified_base 22: mod_base = OTHER; note = 2'O-methyl-cytidine
  modified_base 23: mod_base = OTHER; note = 2'O-methyl-cytidine
  modified_base 1..2: mod_base = OTHER; note = phosphorothioate linkage
  modified_base 2..3: mod_base = OTHER; note = phosphorothioate linkage
  modified_base 21..22: mod_base = OTHER; note = phosphorothioate linkage
  modified_base 22..23: mod_base = OTHER; note = phosphorothioate linkage
  source 1..23: mol_type = other RNA
tttccactgggaatttattcacc

SEQ ID NO: 144 - RNA, 23 nt, synthetic construct
  misc_feature 1..23: note = Description of origin: HCII siRNA antisense strands
  misc_feature 1..23: note = Description of source:Antisense strand ID:
  modified_base 1: mod_base = OTHER; note = 2'O-methyl-guanosine
  modified_base 2: mod_base = OTHER; note = 2'Fluoro-adenosine
  modified_base 3: mod_base = OTHER; note = 2'O-methyl-uridine
  modified_base 4: mod_base = OTHER; note = 2' Fluoro-cytidine
  modified_base 5: mod_base = OTHER; note = 2'O-methyl-cytidine
  modified_base 6: mod_base = OTHER; note = 2' Fluoro-uridine
  modified_base 7: mod_base = OTHER; note = 2'O-methyl-uridine
  modified_base 8: mod_base = OTHER; note = 2' Fluoro-uridine
  modified_base 9: mod_base = OTHER; note = 2' Fluoro-guanosine
  modified_base 10: mod_base = OTHER; note = 2'O-methyl-adenosine
  modified_base 11: mod_base = OTHER; note = 2'O-methyl-adenosine
  modified_base 12: mod_base = OTHER; note = 2'O-methyl-guanosine
  modified_base 13: mod_base = OTHER; note = 2'O-methyl-uridine
  modified_base 14: mod_base = OTHER; note = 2'Fluoro-adenosine
  modified_base 15: mod_base = OTHER; note = 2'O-methyl-guanosine
  modified_base 16: mod_base = OTHER; note = 2'Fluoro-adenosine
  modified_base 17: mod_base = OTHER; note = 2'O-methyl-uridine
  modified_base 18: mod_base = OTHER; note = 2'O-methyl-guanosine
  modified_base 19: mod_base = OTHER; note = 2'O-methyl-cytidine
  modified_base 20: mod_base = OTHER; note = 2'O-methyl-adenosine
  modified_base 21: mod_base = OTHER; note = 2'O-methyl-guanosine
  modified_base 22: mod_base = OTHER; note = 2'O-methyl-uridine
  modified_base 23: mod_base = OTHER; note = 2'O-methyl-uridine
  modified_base 1..2: mod_base = OTHER; note = phosphorothioate linkage
  modified_base 2..3: mod_base = OTHER; note = phosphorothioate linkage
  modified_base 21..22: mod_base = OTHER; note = phosphorothioate linkage
  modified_base 22..23: mod_base = OTHER; note = phosphorothioate linkage
  source 1..23: mol_type = other RNA
gatcctttgaagtagatgcagtt

SEQ ID NO: 145 - RNA, 23 nt, synthetic construct
  misc_feature 1..23: note = Description of origin: HCII siRNA antisense strands
  misc_feature 1..23: note = Description of source:Antisense strand ID:
  modified_base 1: mod_base = OTHER; note = 2'O-methyl-adenosine
  modified_base 2: mod_base = OTHER; note = 2' Fluoro-uridine
  modified_base 3: mod_base = OTHER; note = 2'O-methyl-cytidine
  modified_base 4: mod_base = OTHER; note = 2' Fluoro-cytidine
  modified_base 5: mod_base = OTHER; note = 2'O-methyl-uridine
  modified_base 6: mod_base = OTHER; note = 2' Fluoro-uridine
  modified_base 7: mod_base = OTHER; note = 2'O-methyl-uridine
  modified_base 8: mod_base = OTHER; note = 2' Fluoro-guanosine
  modified_base 9: mod_base = OTHER; note = 2'Fluoro-adenosine
  modified_base 10: mod_base = OTHER; note = 2'O-methyl-adenosine
  modified_base 11: mod_base = OTHER; note = 2'O-methyl-guanosine
  modified_base 12: mod_base = OTHER; note = 2'O-methyl-uridine
  modified_base 13: mod_base = OTHER; note = 2'O-methyl-adenosine
  modified_base 14: mod_base = OTHER; note = 2' Fluoro-guanosine
  modified_base 15: mod_base = OTHER; note = 2'O-methyl-adenosine
  modified_base 16: mod_base = OTHER; note = 2' Fluoro-uridine
  modified_base 17: mod_base = OTHER; note = 2'O-methyl-guanosine
  modified_base 18: mod_base = OTHER; note = 2'O-methyl-cytidine
  modified_base 19: mod_base = OTHER; note = 2'O-methyl-adenosine
  modified_base 20: mod_base = OTHER; note = 2'O-methyl-guanosine
  modified_base 21: mod_base = OTHER; note = 2'O-methyl-uridine
  modified_base 22: mod_base = OTHER; note = 2'O-methyl-uridine
  modified_base 23: mod_base = OTHER; note = 2'O-methyl-guanosine
  modified_base 1..2: mod_base = OTHER; note = phosphorothioate linkage
  modified_base 2..3: mod_base = OTHER; note = phosphorothioate linkage
  modified_base 21..22: mod_base = OTHER; note = phosphorothioate linkage
  modified_base 22..23: mod_base = OTHER; note = phosphorothioate linkage
  source 1..23: mol_type = other RNA
atcctttgaagtagatgcagttg

SEQ ID NO: 146 - RNA, 23 nt, synthetic construct
  misc_feature 1..23: note = Description of origin: HCII siRNA antisense strands
  misc_feature 1..23: note = Description of source:Antisense strand ID:
  modified_base 1: mod_base = OTHER; note = 2'O-methyl-adenosine
  modified_base 2: mod_base = OTHER; note = 2' Fluoro-cytidine
  modified_base 3: mod_base = OTHER; note = 2'O-methyl-uridine
  modified_base 4: mod_base = OTHER; note = 2' Fluoro-uridine
  modified_base 5: mod_base = OTHER; note = 2'O-methyl-guanosine
  modified_base 6: mod_base = OTHER; note = 2' Fluoro-uridine
  modified_base 7: mod_base = OTHER; note = 2'O-methyl-uridine
  modified_base 8: mod_base = OTHER; note = 2' Fluoro-cytidine
  modified_base 9: mod_base = OTHER; note = 2'Fluoro-adenosine
  modified_base 10: mod_base = OTHER; note = 2'O-methyl-uridine
  modified_base 11: mod_base = OTHER; note = 2'O-methyl-guanosine
  modified_base 12: mod_base = OTHER; note = 2'O-methyl-guanosine
  modified_base 13: mod_base = OTHER; note = 2'O-methyl-guanosine
  modified_base 14: mod_base = OTHER; note = 2' Fluoro-uridine
  modified_base 15: mod_base = OTHER; note = 2'O-methyl-cytidine
  modified_base 16: mod_base = OTHER; note = 2' Fluoro-uridine
  modified_base 17: mod_base = OTHER; note = 2'O-methyl-cytidine
  modified_base 18: mod_base = OTHER; note = 2'O-methyl-uridine
  modified_base 19: mod_base = OTHER; note = 2'O-methyl-cytidine
  modified_base 20: mod_base = OTHER; note = 2'O-methyl-cytidine
  modified_base 21: mod_base = OTHER; note = 2'O-methyl-cytidine
  modified_base 22: mod_base = OTHER; note = 2'O-methyl-uridine
  modified_base 23: mod_base = OTHER; note = 2'O-methyl-uridine
  modified_base 1..2: mod_base = OTHER; note = phosphorothioate linkage
  modified_base 2..3: mod_base = OTHER; note = phosphorothioate linkage
  modified_base 21..22: mod_base = OTHER; note = phosphorothioate linkage
  modified_base 22..23: mod_base = OTHER; note = phosphorothioate linkage
  source 1..23: mol_type = other RNA
acttgttcatgggtctctccctt

SEQ ID NO: 147 - RNA, 23 nt, synthetic construct
  misc_feature 1..23: note = Description of origin: HCII siRNA antisense strands
  misc_feature 1..23: note = Description of source:Antisense strand ID:
  modified_base 1: mod_base = OTHER; note = 2'O-methyl-uridine
  modified_base 2: mod_base = OTHER; note = 2' Fluoro-cytidine
  modified_base 3: mod_base = OTHER; note = 2'O-methyl-cytidine
  modified_base 4: mod_base = OTHER; note = 2'Fluoro-adenosine
  modified_base 5: mod_base = OTHER; note = 2'O-methyl-cytidine
  modified_base 6: mod_base = OTHER; note = 2' Fluoro-uridine
  modified_base 7: mod_base = OTHER; note = 2'O-methyl-guanosine
  modified_base 8: mod_base = OTHER; note = 2' Fluoro-guanosine
  modified_base 9: mod_base = OTHER; note = 2' Fluoro-guanosine
  modified_base 10: mod_base = OTHER; note = 2'O-methyl-adenosine
  modified_base 11: mod_base = OTHER; note = 2'O-methyl-adenosine
  modified_base 12: mod_base = OTHER; note = 2'O-methyl-uridine
  modified_base 13: mod_base = OTHER; note = 2'O-methyl-uridine
  modified_base 14: mod_base = OTHER; note = 2' Fluoro-uridine
  modified_base 15: mod_base = OTHER; note = 2'O-methyl-adenosine
  modified_base 16: mod_base = OTHER; note = 2' Fluoro-uridine
  modified_base 17: mod_base = OTHER; note = 2'O-methyl-uridine
  modified_base 18: mod_base = OTHER; note = 2'O-methyl-cytidine
  modified_base 19: mod_base = OTHER; note = 2'O-methyl-adenosine
  modified_base 20: mod_base = OTHER; note = 2'O-methyl-cytidine
  modified_base 21: mod_base = OTHER; note = 2'O-methyl-cytidine
  modified_base 22: mod_base = OTHER; note = 2'O-methyl-cytidine
  modified_base 23: mod_base = OTHER; note = 2'O-methyl-adenosine
  modified_base 1..2: mod_base = OTHER; note = phosphorothioate linkage
  modified_base 2..3: mod_base = OTHER; note = phosphorothioate linkage
  modified_base 21..22: mod_base = OTHER; note = phosphorothioate linkage
  modified_base 22..23: mod_base = OTHER; note = phosphorothioate linkage
  source 1..23: mol_type = other RNA
tccactgggaatttattcaccca

SEQ ID NO: 148 - RNA, 23 nt, synthetic construct
  misc_feature 1..23: note = Description of origin: HCII siRNA antisense strands
  misc_feature 1..23: note = Description of source:Antisense strand ID:
  modified_base 1: mod_base = OTHER; note = 2'O-methyl-uridine
  modified_base 2: mod_base = OTHER; note = 2' Fluoro-guanosine
  modified_base 3: mod_base = OTHER; note = 2'O-methyl-uridine
  modified_base 4: mod_base = OTHER; note = 2'Fluoro-adenosine
  modified_base 5: mod_base = OTHER; note = 2'O-methyl-cytidine
  modified_base 6: mod_base = OTHER; note = 2' Fluoro-cytidine
  modified_base 7: mod_base = OTHER; note = 2'O-methyl-cytidine
  modified_base 8: mod_base = OTHER; note = 2'Fluoro-adenosine
  modified_base 9: mod_base = OTHER; note = 2'Fluoro-adenosine
  modified_base 10: mod_base = OTHER; note = 2'O-methyl-adenosine
  modified_base 11: mod_base = OTHER; note = 2'O-methyl-adenosine
  modified_base 12: mod_base = OTHER; note = 2'O-methyl-uridine
  modified_base 13: mod_base = OTHER; note = 2'O-methyl-uridine
  modified_base 14: mod_base = OTHER; note = 2' Fluoro-cytidine
  modified_base 15: mod_base = OTHER; note = 2'O-methyl-cytidine
  modified_base 16: mod_base = OTHER; note = 2' Fluoro-uridine
  modified_base 17: mod_base = OTHER; note = 2'O-methyl-cytidine
  modified_base 18: mod_base = OTHER; note = 2'O-methyl-cytidine
  modified_base 19: mod_base = OTHER; note = 2'O-methyl-uridine
  modified_base 20: mod_base = OTHER; note = 2'O-methyl-guanosine
  modified_base 21: mod_base = OTHER; note = 2'O-methyl-adenosine
  modified_base 22: mod_base = OTHER; note = 2'O-methyl-adenosine
  modified_base 23: mod_base = OTHER; note = 2'O-methyl-guanosine
  modified_base 1..2: mod_base = OTHER; note = phosphorothioate linkage
  modified_base 2..3: mod_base = OTHER; note = phosphorothioate linkage
  modified_base 21..22: mod_base = OTHER; note = phosphorothioate linkage
  modified_base 22..23: mod_base = OTHER; note = phosphorothioate linkage
  source 1..23: mol_type = other RNA
tgtacccaaaattcctcctgaag

SEQ ID NO: 149 - RNA, 23 nt, synthetic construct
  misc_feature 1..23: note = Description of origin: HCII siRNA antisense strands
  misc_feature 1..23: note = Description of source:Antisense strand ID:
  modified_base 1: mod_base = OTHER; note = 2'O-methyl-uridine
  modified_base 2: mod_base = OTHER; note = 2' Fluoro-uridine
  modified_base 3: mod_base = OTHER; note = 2'O-methyl-cytidine
  modified_base 4: mod_base = OTHER; note = 2' Fluoro-cytidine
  modified_base 5: mod_base = OTHER; note = 2'O-methyl-cytidine
  modified_base 6: mod_base = OTHER; note = 2'Fluoro-adenosine
  modified_base 7: mod_base = OTHER; note = 2'O-methyl-uridine
  modified_base 8: mod_base = OTHER; note = 2' Fluoro-guanosine
  modified_base 9: mod_base = OTHER; note = 2'Fluoro-adenosine
  modified_base 10: mod_base = OTHER; note = 2'O-methyl-adenosine
  modified_base 11: mod_base = OTHER; note = 2'O-methyl-guanosine
  modified_base 12: mod_base = OTHER; note = 2'O-methyl-adenosine
  modified_base 13: mod_base = OTHER; note = 2'O-methyl-guanosine
  modified_base 14: mod_base = OTHER; note = 2' Fluoro-cytidine
  modified_base 15: mod_base = OTHER; note = 2'O-methyl-adenosine
  modified_base 16: mod_base = OTHER; note = 2' Fluoro-guanosine
  modified_base 17: mod_base = OTHER; note = 2'O-methyl-guanosine
  modified_base 18: mod_base = OTHER; note = 2'O-methyl-cytidine
  modified_base 19: mod_base = OTHER; note = 2'O-methyl-adenosine
  modified_base 20: mod_base = OTHER; note = 2'O-methyl-guanosine
  modified_base 21: mod_base = OTHER; note = 2'O-methyl-cytidine
  modified_base 22: mod_base = OTHER; note = 2'O-methyl-uridine
  modified_base 23: mod_base = OTHER; note = 2'O-methyl-guanosine
  modified_base 1..2: mod_base = OTHER; note = phosphorothioate linkage
  modified_base 2..3: mod_base = OTHER; note = phosphorothioate linkage
  modified_base 21..22: mod_base = OTHER; note = phosphorothioate linkage
  modified_base 22..23: mod_base = OTHER; note = phosphorothioate linkage
  source 1..23: mol_type = other RNA
ttcccatgaagagcaggcagctg

SEQ ID NO: 150 - RNA, 23 nt, synthetic construct
  misc_feature 1..23: note = Description of origin: HCII siRNA antisense strands
  misc_feature 1..23: note = Description of source:Antisense strand ID:
  modified_base 1: mod_base = OTHER; note = 2'O-methyl-uridine
  modified_base 2: mod_base = OTHER; note = 2' Fluoro-cytidine
  modified_base 3: mod_base = OTHER; note = 2'O-methyl-uridine
  modified_base 4: mod_base = OTHER; note = 2' Fluoro-uridine
  modified_base 5: mod_base = OTHER; note = 2'O-methyl-uridine
  modified_base 6: mod_base = OTHER; note = 2' Fluoro-uridine
  modified_base 7: mod_base = OTHER; note = 2'O-methyl-adenosine
  modified_base 8: mod_base = OTHER; note = 2' Fluoro-uridine
  modified_base 9: mod_base = OTHER; note = 2' Fluoro-guanosine
  modified_base 10: mod_base = OTHER; note = 2'O-methyl-adenosine
  modified_base 11: mod_base = OTHER; note = 2'O-methyl-guanosine
  modified_base 12: mod_base = OTHER; note = 2'O-methyl-guanosine
  modified_base 13: mod_base = OTHER; note = 2'O-methyl-cytidine
  modified_base 14: mod_base = OTHER; note = 2' Fluoro-cytidine
  modified_base 15: mod_base = OTHER; note = 2'O-methyl-cytidine
  modified_base 16: mod_base = OTHER; note = 2' Fluoro-uridine
  modified_base 17: mod_base = OTHER; note = 2'O-methyl-uridine
  modified_base 18: mod_base = OTHER; note = 2'O-methyl-guanosine
  modified_base 19: mod_base = OTHER; note = 2'O-methyl-guanosine
  modified_base 20: mod_base = OTHER; note = 2'O-methyl-uridine
  modified_base 21: mod_base = OTHER; note = 2'O-methyl-guanosine
  modified_base 22: mod_base = OTHER; note = 2'O-methyl-adenosine
  modified_base 23: mod_base = OTHER; note = 2'O-methyl-guanosine
  modified_base 1..2: mod_base = OTHER; note = phosphorothioate linkage
  modified_base 2..3: mod_base = OTHER; note = phosphorothioate linkage
  modified_base 21..22: mod_base = OTHER; note = phosphorothioate linkage
  modified_base 22..23: mod_base = OTHER; note = phosphorothioate linkage
  source 1..23: mol_type = other RNA
tcttttatgaggcccttggtgag

SEQ ID NO: 151 - RNA, 23 nt, synthetic construct
  misc_feature 1..23: note = Description of origin: HCII siRNA antisense strands
  misc_feature 1..23: note = Description of source:Antisense strand ID:
  modified_base 1: mod_base = OTHER; note = 2'O-methyl-adenosine
  modified_base 2: mod_base = OTHER; note = 2'Fluoro-adenosine
  modified_base 3: mod_base = OTHER; note = 2'O-methyl-cytidine
  modified_base 4: mod_base = OTHER; note = 2' Fluoro-uridine
  modified_base 5: mod_base = OTHER; note = 2'O-methyl-guanosine
  modified_base 6: mod_base = OTHER; note = 2' Fluoro-cytidine
  modified_base 7: mod_base = OTHER; note = 2'O-methyl-uridine
  modified_base 8: mod_base = OTHER; note = 2' Fluoro-uridine
  modified_base 9: mod_base = OTHER; note = 2' Fluoro-cytidine
  modified_base 10: mod_base = OTHER; note = 2'O-methyl-uridine
  modified_base 11: mod_base = OTHER; note = 2'O-methyl-guanosine
  modified_base 12: mod_base = OTHER; note = 2'O-methyl-guanosine
  modified_base 13: mod_base = OTHER; note = 2'O-methyl-adenosine
  modified_base 14: mod_base = OTHER; note = 2' Fluoro-uridine
  modified_base 15: mod_base = OTHER; note = 2'O-methyl-adenosine
  modified_base 16: mod_base = OTHER; note = 2' Fluoro-uridine
  modified_base 17: mod_base = OTHER; note = 2'O-methyl-adenosine
  modified_base 18: mod_base = OTHER; note = 2'O-methyl-adenosine
  modified_base 19: mod_base = OTHER; note = 2'O-methyl-adenosine
  modified_base 20: mod_base = OTHER; note = 2'O-methyl-guanosine
  modified_base 21: mod_base = OTHER; note = 2'O-methyl-guanosine
  modified_base 22: mod_base = OTHER; note = 2'O-methyl-uridine
  modified_base 23: mod_base = OTHER; note = 2'O-methyl-cytidine
  modified_base 1..2: mod_base = OTHER; note = phosphorothioate linkage
  modified_base 2..3: mod_base = OTHER; note = phosphorothioate linkage
  modified_base 21..22: mod_base = OTHER; note = phosphorothioate linkage
  modified_base 22..23: mod_base = OTHER; note = phosphorothioate linkage
  source 1..23: mol_type = other RNA
aactgcttctggatataaaggtc

SEQ ID NO: 152 - RNA, 23 nt, synthetic construct
  misc_feature 1..23: note = Description of origin: HCII siRNA antisense strands
  misc_feature 1..23: note = Description of source:Antisense strand ID:
  modified_base 1: mod_base = OTHER; note = 2'O-methyl-cytidine
  modified_base 2: mod_base = OTHER; note = 2' Fluoro-cytidine
  modified_base 3: mod_base = OTHER; note = 2'O-methyl-uridine
  modified_base 4: mod_base = OTHER; note = 2' Fluoro-uridine
  modified_base 5: mod_base = OTHER; note = 2'O-methyl-uridine
  modified_base 6: mod_base = OTHER; note = 2' Fluoro-guanosine
  modified_base 7: mod_base = OTHER; note = 2'O-methyl-adenosine
  modified_base 8: mod_base = OTHER; note = 2'Fluoro-adenosine
  modified_base 9: mod_base = OTHER; note = 2' Fluoro-guanosine
  modified_base 10: mod_base = OTHER; note = 2'O-methyl-uridine
  modified_base 11: mod_base = OTHER; note = 2'O-methyl-adenosine
  modified_base 12: mod_base = OTHER; note = 2'O-methyl-guanosine
  modified_base 13: mod_base = OTHER; note = 2'O-methyl-adenosine
  modified_base 14: mod_base = OTHER; note = 2' Fluoro-uridine
  modified_base 15: mod_base = OTHER; note = 2'O-methyl-guanosine
  modified_base 16: mod_base = OTHER; note = 2' Fluoro-cytidine
  modified_base 17: mod_base = OTHER; note = 2'O-methyl-adenosine
  modified_base 18: mod_base = OTHER; note = 2'O-methyl-guanosine
  modified_base 19: mod_base = OTHER; note = 2'O-methyl-uridine
  modified_base 20: mod_base = OTHER; note = 2'O-methyl-uridine
  modified_base 21: mod_base = OTHER; note = 2'O-methyl-guanosine
  modified_base 22: mod_base = OTHER; note = 2'O-methyl-adenosine
  modified_base 23: mod_base = OTHER; note = 2'O-methyl-guanosine
  modified_base 1..2: mod_base = OTHER; note = phosphorothioate linkage
  modified_base 2..3: mod_base = OTHER; note = phosphorothioate linkage
  modified_base 21..22: mod_base = OTHER; note = phosphorothioate linkage
  modified_base 22..23: mod_base = OTHER; note = phosphorothioate linkage
  source 1..23: mol_type = other RNA
cctttgaagtagatgcagttgag

SEQ ID NO: 153 - RNA, 23 nt, synthetic construct
  misc_feature 1..23: note = Description of origin: HCII siRNA antisense strands
  misc_feature 1..23: note = Description of source:Antisense strand ID:
  modified_base 1: mod_base = OTHER; note = 2'O-methyl-uridine
  modified_base 2: mod_base = OTHER; note = 2' Fluoro-uridine
  modified_base 3: mod_base = OTHER; note = 2'O-methyl-adenosine
  modified_base 4: mod_base = OTHER; note = 2'Fluoro-adenosine
  modified_base 5: mod_base = OTHER; note = 2'O-methyl-guanosine
  modified_base 6: mod_base = OTHER; note = 2'Fluoro-adenosine
  modified_base 7: mod_base = OTHER; note = 2'O-methyl-cytidine
  modified_base 8: mod_base = OTHER; note = 2' Fluoro-guanosine
  modified_base 9: mod_base = OTHER; note = 2' Fluoro-cytidine
  modified_base 10: mod_base = OTHER; note = 2'O-methyl-uridine
  modified_base 11: mod_base = OTHER; note = 2'O-methyl-guanosine
  modified_base 12: mod_base = OTHER; note = 2'O-methyl-guanosine
  modified_base 13: mod_base = OTHER; note = 2'O-methyl-adenosine
  modified_base 14: mod_base = OTHER; note = 2' Fluoro-uridine
  modified_base 15: mod_base = OTHER; note = 2'O-methyl-cytidine
  modified_base 16: mod_base = OTHER; note = 2' Fluoro-cytidine
  modified_base 17: mod_base = OTHER; note = 2'O-methyl-guanosine
  modified_base 18: mod_base = OTHER; note = 2'O-methyl-guanosine
  modified_base 19: mod_base = OTHER; note = 2'O-methyl-cytidine
  modified_base 20: mod_base = OTHER; note = 2'O-methyl-uridine
  modified_base 21: mod_base = OTHER; note = 2'O-methyl-cytidine
  modified_base 22: mod_base = OTHER; note = 2'O-methyl-uridine
  modified_base 23: mod_base = OTHER; note = 2'O-methyl-uridine
  modified_base 1..2: mod_base = OTHER; note = phosphorothioate linkage
  modified_base 2..3: mod_base = OTHER; note = phosphorothioate linkage
  modified_base 21..22: mod_base = OTHER; note = phosphorothioate linkage
  modified_base 22..23: mod_base = OTHER; note = phosphorothioate linkage
  source 1..23: mol_type = other RNA
ttaagacgctggatccggctctt

SEQ ID NO: 154 - RNA, 23 nt, synthetic construct
  misc_feature 1..23: note = Description of origin: HCII siRNA antisense strands
  misc_feature 1..23: note = Description of source:Antisense strand ID:
  modified_base 1: mod_base = OTHER; note = 2'O-methyl-guanosine
  modified_base 2: mod_base = OTHER; note = 2'Fluoro-adenosine
  modified_base 3: mod_base = OTHER; note = 2'O-methyl-guanosine
  modified_base 4: mod_base = OTHER; note = 2' Fluoro-guanosine
  modified_base 5: mod_base = OTHER; note = 2'O-methyl-adenosine
  modified_base 6: mod_base = OTHER; note = 2' Fluoro-uridine
  modified_base 7: mod_base = OTHER; note = 2'O-methyl-guanosine
  modified_base 8: mod_base = OTHER; note = 2' Fluoro-uridine
  modified_base 9: mod_base = OTHER; note = 2' Fluoro-uridine
  modified_base 10: mod_base = OTHER; note = 2'O-methyl-adenosine
  modified_base 11: mod_base = OTHER; note = 2'O-methyl-adenosine
  modified_base 12: mod_base = OTHER; note = 2'O-methyl-guanosine
  modified_base 13: mod_base = OTHER; note = 2'O-methyl-adenosine
  modified_base 14: mod_base = OTHER; note = 2' Fluoro-cytidine
  modified_base 15: mod_base = OTHER; note = 2'O-methyl-guanosine
  modified_base 16: mod_base = OTHER; note = 2' Fluoro-cytidine
  modified_base 17: mod_base = OTHER; note = 2'O-methyl-uridine
  modified_base 18: mod_base = OTHER; note = 2'O-methyl-guanosine
  modified_base 19: mod_base = OTHER; note = 2'O-methyl-guanosine
  modified_base 20: mod_base = OTHER; note = 2'O-methyl-adenosine
  modified_base 21: mod_base = OTHER; note = 2'O-methyl-uridine
  modified_base 22: mod_base = OTHER; note = 2'O-methyl-cytidine
  modified_base 23: mod_base = OTHER; note = 2'O-methyl-cytidine
  modified_base 1..2: mod_base = OTHER; note = phosphorothioate linkage
  modified_base 2..3: mod_base = OTHER; note = phosphorothioate linkage
  modified_base 21..22: mod_base = OTHER; note = phosphorothioate linkage
  modified_base 22..23: mod_base = OTHER; note = phosphorothioate linkage
  source 1..23: mol_type = other RNA
gaggatgttaagacgctggatcc

SEQ ID NO: 155 - RNA, 23 nt, synthetic construct
  misc_feature 1..23: note = Description of origin: HCII siRNA antisense strands
  misc_feature 1..23: note = Description of source:Antisense strand ID:
  modified_base 1: mod_base = OTHER; note = 2'O-methyl-uridine
  modified_base 2: mod_base = OTHER; note = 2' Fluoro-cytidine
  modified_base 3: mod_base = OTHER; note = 2'O-methyl-uridine
  modified_base 4: mod_base = OTHER; note = 2' Fluoro-guanosine
  modified_base 5: mod_base = OTHER; note = 2'O-methyl-uridine
  modified_base 6: mod_base = OTHER; note = 2' Fluoro-uridine
  modified_base 7: mod_base = OTHER; note = 2'O-methyl-uridine
  modified_base 8: mod_base = OTHER; note = 2' Fluoro-guanosine
  modified_base 9: mod_base = OTHER; note = 2' Fluoro-uridine
  modified_base 10: mod_base = OTHER; note = 2'O-methyl-cytidine
  modified_base 11: mod_base = OTHER; note = 2'O-methyl-adenosine
  modified_base 12: mod_base = OTHER; note = 2'O-methyl-uridine
  modified_base 13: mod_base = OTHER; note = 2'O-methyl-guanosine
  modified_base 14: mod_base = OTHER; note = 2' Fluoro-cytidine
  modified_base 15: mod_base = OTHER; note = 2'O-methyl-uridine
  modified_base 16: mod_base = OTHER; note = 2' Fluoro-uridine
  modified_base 17: mod_base = OTHER; note = 2'O-methyl-uridine
  modified_base 18: mod_base = OTHER; note = 2'O-methyl-uridine
  modified_base 19: mod_base = OTHER; note = 2'O-methyl-uridine
  modified_base 20: mod_base = OTHER; note = 2'O-methyl-uridine
  modified_base 21: mod_base = OTHER; note = 2'O-methyl-guanosine
  modified_base 22: mod_base = OTHER; note = 2'O-methyl-cytidine
  modified_base 23: mod_base = OTHER; note = 2'O-methyl-cytidine
  modified_base 1..2: mod_base = OTHER; note = phosphorothioate linkage
  modified_base 2..3: mod_base = OTHER; note = phosphorothioate linkage
  modified_base 21..22: mod_base = OTHER; note = phosphorothioate linkage
  modified_base 22..23: mod_base = OTHER; note = phosphorothioate linkage
  source 1..23: mol_type = other RNA
tctgtttgtcatgcttttttgcc

SEQ ID NO: 156 - RNA, 23 nt, synthetic construct
  misc_feature 1..23: note = Description of origin: HCII siRNA antisense strands
  misc_feature 1..23: note = Description of source:Antisense strand ID:
  modified_base 1: mod_base = OTHER; note = 2'O-methyl-guanosine
  modified_base 2: mod_base = OTHER; note = 2' Fluoro-uridine
  modified_base 3: mod_base = OTHER; note = 2'O-methyl-guanosine
  modified_base 4: mod_base = OTHER; note = 2' Fluoro-uridine
  modified_base 5: mod_base = OTHER; note = 2'O-methyl-adenosine
  modified_base 6: mod_base = OTHER; note = 2' Fluoro-cytidine
  modified_base 7: mod_base = OTHER; note = 2'O-methyl-cytidine
  modified_base 8: mod_base = OTHER; note = 2' Fluoro-cytidine
  modified_base 9: mod_base = OTHER; note = 2'Fluoro-adenosine
  modified_base 10: mod_base = OTHER; note = 2'O-methyl-adenosine
  modified_base 11: mod_base = OTHER; note = 2'O-methyl-adenosine
  modified_base 12: mod_base = OTHER; note = 2'O-methyl-adenosine
  modified_base 13: mod_base = OTHER; note = 2'O-methyl-uridine
  modified_base 14: mod_base = OTHER; note = 2' Fluoro-uridine
  modified_base 15: mod_base = OTHER; note = 2'O-methyl-cytidine
  modified_base 16: mod_base = OTHER; note = 2' Fluoro-cytidine
  modified_base 17: mod_base = OTHER; note = 2'O-methyl-uridine
  modified_base 18: mod_base = OTHER; note = 2'O-methyl-cytidine
  modified_base 19: mod_base = OTHER; note = 2'O-methyl-cytidine
  modified_base 20: mod_base = OTHER; note = 2'O-methyl-uridine
  modified_base 21: mod_base = OTHER; note = 2'O-methyl-guanosine
  modified_base 22: mod_base = OTHER; note = 2'O-methyl-adenosine
  modified_base 23: mod_base = OTHER; note = 2'O-methyl-adenosine
  modified_base 1..2: mod_base = OTHER; note = phosphorothioate linkage
  modified_base 2..3: mod_base = OTHER; note = phosphorothioate linkage
  modified_base 21..22: mod_base = OTHER; note = phosphorothioate linkage
  modified_base 22..23: mod_base = OTHER; note = phosphorothioate linkage
  source 1..23: mol_type = other RNA
gtgtacccaaaattcctcctgaa

SEQ ID NO: 157 - RNA, 23 nt, synthetic construct
  misc_feature 1..23: note = Description of origin: HCII siRNA antisense strands
  misc_feature 1..23: note = Description of source:Antisense strand ID:
  modified_base 1: mod_base = OTHER; note = 2'O-methyl-uridine
  modified_base 2: mod_base = OTHER; note = 2' Fluoro-uridine
  modified_base 3: mod_base = OTHER; note = 2'O-methyl-cytidine
  modified_base 4: mod_base = OTHER; note = 2'Fluoro-adenosine
  modified_base 5: mod_base = OTHER; note = 2'O-methyl-guanosine
  modified_base 6: mod_base = OTHER; note = 2' Fluoro-cytidine
  modified_base 7: mod_base = OTHER; note = 2'O-methyl-cytidine
  modified_base 8: mod_base = OTHER; note = 2' Fluoro-guanosine
  modified_base 9: mod_base = OTHER; note = 2' Fluoro-guanosine
  modified_base 10: mod_base = OTHER; note = 2'O-methyl-adenosine
  modified_base 11: mod_base = OTHER; note = 2'O-methyl-adenosine
  modified_base 12: mod_base = OTHER; note = 2'O-methyl-guanosine
  modified_base 13: mod_base = OTHER; note = 2'O-methyl-uridine
  modified_base 14: mod_base = OTHER; note = 2' Fluoro-uridine
  modified_base 15: mod_base = OTHER; note = 2'O-methyl-guanosine
  modified_base 16: mod_base = OTHER; note = 2' Fluoro-uridine
  modified_base 17: mod_base = OTHER; note = 2'O-methyl-guanosine
  modified_base 18: mod_base = OTHER; note = 2'O-methyl-guanosine
  modified_base 19: mod_base = OTHER; note = 2'O-methyl-uridine
  modified_base 20: mod_base = OTHER; note = 2'O-methyl-uridine
  modified_base 21: mod_base = OTHER; note = 2'O-methyl-guanosine
  modified_base 22: mod_base = OTHER; note = 2'O-methyl-uridine
  modified_base 23: mod_base = OTHER; note = 2'O-methyl-guanosine
  modified_base 1..2: mod_base = OTHER; note = phosphorothioate linkage
  modified_base 2..3: mod_base = OTHER; note = phosphorothioate linkage
  modified_base 21..22: mod_base = OTHER; note = phosphorothioate linkage
  modified_base 22..23: mod_base = OTHER; note = phosphorothioate linkage
  source 1..23: mol_type = other RNA
ttcagccggaagttgtggttgtg

SEQ ID NO: 158 - RNA, 23 nt, synthetic construct
  misc_feature 1..23: note = Description of origin: HCII siRNA antisense strands
  misc_feature 1..23: note = Description of source:Antisense strand ID:
  modified_base 1: mod_base = OTHER; note = 2'O-methyl-uridine
  modified_base 2: mod_base = OTHER; note = 2' Fluoro-guanosine
  modified_base 3: mod_base = OTHER; note = 2'O-methyl-uridine
  modified_base 4: mod_base = OTHER; note = 2' Fluoro-uridine
  modified_base 5: mod_base = OTHER; note = 2'O-methyl-uridine
  modified_base 6: mod_base = OTHER; note = 2' Fluoro-guanosine
  modified_base 7: mod_base = OTHER; note = 2'O-methyl-uridine
  modified_base 8: mod_base = OTHER; note = 2' Fluoro-cytidine
  modified_base 9: mod_base = OTHER; note = 2'Fluoro-adenosine
  modified_base 10: mod_base = OTHER; note = 2'O-methyl-uridine
  modified_base 11: mod_base = OTHER; note = 2'O-methyl-guanosine
  modified_base 12: mod_base = OTHER; note = 2'O-methyl-cytidine
  modified_base 13: mod_base = OTHER; note = 2'O-methyl-uridine
  modified_base 14: mod_base = OTHER; note = 2' Fluoro-uridine
  modified_base 15: mod_base = OTHER; note = 2'O-methyl-uridine
  modified_base 16: mod_base = OTHER; note = 2' Fluoro-uridine
  modified_base 17: mod_base = OTHER; note = 2'O-methyl-uridine
  modified_base 18: mod_base = OTHER; note = 2'O-methyl-uridine
  modified_base 19: mod_base = OTHER; note = 2'O-methyl-guanosine
  modified_base 20: mod_base = OTHER; note = 2'O-methyl-cytidine
  modified_base 21: mod_base = OTHER; note = 2'O-methyl-cytidine
  modified_base 22: mod_base = OTHER; note = 2'O-methyl-adenosine
  modified_base 23: mod_base = OTHER; note = 2'O-methyl-uridine
  modified_base 1..2: mod_base = OTHER; note = phosphorothioate linkage
  modified_base 2..3: mod_base = OTHER; note = phosphorothioate linkage
  modified_base 21..22: mod_base = OTHER; note = phosphorothioate linkage
  modified_base 22..23: mod_base = OTHER; note = phosphorothioate linkage
  source 1..23: mol_type = other RNA
tgtttgtcatgcttttttgccat

SEQ ID NO: 159 - RNA, 23 nt, synthetic construct
  misc_feature 1..23: note = Description of origin: HCII siRNA antisense strands
  misc_feature 1..23: note = Description of source:Antisense strand ID:
  modified_base 1: mod_base = OTHER; note = 2'O-methyl-adenosine
  modified_base 2: mod_base = OTHER; note = 2' Fluoro-uridine
  modified_base 3: mod_base = OTHER; note = 2'O-methyl-uridine
  modified_base 4: mod_base = OTHER; note = 2' Fluoro-uridine
  modified_base 5: mod_base = OTHER; note = 2'O-methyl-cytidine
  modified_base 6: mod_base = OTHER; note = 2' Fluoro-cytidine
  modified_base 7: mod_base = OTHER; note = 2'O-methyl-adenosine
  modified_base 8: mod_base = OTHER; note = 2' Fluoro-cytidine
  modified_base 9: mod_base = OTHER; note = 2' Fluoro-uridine
  modified_base 10: mod_base = OTHER; note = 2'O-methyl-guanosine
  modified_base 11: mod_base = OTHER; note = 2'O-methyl-guanosine
  modified_base 12: mod_base = OTHER; note = 2'O-methyl-guanosine
  modified_base 13: mod_base = OTHER; note = 2'O-methyl-adenosine
  modified_base 14: mod_base = OTHER; note = 2'Fluoro-adenosine
  modified_base 15: mod_base = OTHER; note = 2'O-methyl-uridine
  modified_base 16: mod_base = OTHER; note = 2' Fluoro-uridine
  modified_base 17: mod_base = OTHER; note = 2'O-methyl-uridine
  modified_base 18: mod_base = OTHER; note = 2'O-methyl-adenosine
  modified_base 19: mod_base = OTHER; note = 2'O-methyl-uridine
  modified_base 20: mod_base = OTHER; note = 2'O-methyl-uridine
  modified_base 21: mod_base = OTHER; note = 2'O-methyl-cytidine
  modified_base 22: mod_base = OTHER; note = 2'O-methyl-adenosine
  modified_base 23: mod_base = OTHER; note = 2'O-methyl-cytidine
  modified_base 1..2: mod_base = OTHER; note = phosphorothioate linkage
  modified_base 2..3: mod_base = OTHER; note = phosphorothioate linkage
  modified_base 21..22: mod_base = OTHER; note = phosphorothioate linkage
  modified_base 22..23: mod_base = OTHER; note = phosphorothioate linkage
  source 1..23: mol_type = other RNA
atttccactgggaatttattcac

SEQ ID NO: 160 - RNA, 23 nt, synthetic construct
  misc_feature 1..23: note = Description of origin: HCII siRNA antisense strands
  misc_feature 1..23: note = Description of source:Antisense strand ID:
  modified_base 1: mod_base = OTHER; note = 2'O-methyl-adenosine
  modified_base 2: mod_base = OTHER; note = 2' Fluoro-cytidine
  modified_base 3: mod_base = OTHER; note = 2'O-methyl-adenosine
  modified_base 4: mod_base = OTHER; note = 2'Fluoro-adenosine
  modified_base 5: mod_base = OTHER; note = 2'O-methyl-uridine
  modified_base 6: mod_base = OTHER; note = 2' Fluoro-uridine
  modified_base 7: mod_base = OTHER; note = 2'O-methyl-adenosine
  modified_base 8: mod_base = OTHER; note = 2' Fluoro-guanosine
  modified_base 9: mod_base = OTHER; note = 2' Fluoro-cytidine
  modified_base 10: mod_base = OTHER; note = 2'O-methyl-adenosine
  modified_base 11: mod_base = OTHER; note = 2'O-methyl-uridine
  modified_base 12: mod_base = OTHER; note = 2'O-methyl-guanosine
  modified_base 13: mod_base = OTHER; note = 2'O-methyl-cytidine
  modified_base 14: mod_base = OTHER; note = 2' Fluoro-uridine
  modified_base 15: mod_base = OTHER; note = 2'O-methyl-guanosine
  modified_base 16: mod_base = OTHER; note = 2'Fluoro-adenosine
  modified_base 17: mod_base = OTHER; note = 2'O-methyl-uridine
  modified_base 18: mod_base = OTHER; note = 2'O-methyl-guanosine
  modified_base 19: mod_base = OTHER; note = 2'O-methyl-cytidine
  modified_base 20: mod_base = OTHER; note = 2'O-methyl-cytidine
  modified_base 21: mod_base = OTHER; note = 2'O-methyl-cytidine
  modified_base 22: mod_base = OTHER; note = 2'O-methyl-cytidine
  modified_base 23: mod_base = OTHER; note = 2'O-methyl-cytidine
  modified_base 1..2: mod_base = OTHER; note = phosphorothioate linkage
  modified_base 2..3: mod_base = OTHER; note = phosphorothioate linkage
  modified_base 21..22: mod_base = OTHER; note = phosphorothioate linkage
  modified_base 22..23: mod_base = OTHER; note = phosphorothioate linkage
  source 1..23: mol_type = other RNA
acaattagcatgctgatgccccc

SEQ ID NO: 161 - RNA, 23 nt, synthetic construct
  misc_feature 1..23: note = Description of origin: HCII siRNA antisense strands
  misc_feature 1..23: note = Description of source:Antisense strand ID:
  modified_base 1: mod_base = OTHER; note = 2'O-methyl-guanosine
  modified_base 2: mod_base = OTHER; note = 2' Fluoro-uridine
  modified_base 3: mod_base = OTHER; note = 2'O-methyl-uridine
  modified_base 4: mod_base = OTHER; note = 2' Fluoro-cytidine
  modified_base 5: mod_base = OTHER; note = 2'O-methyl-uridine
  modified_base 6: mod_base = OTHER; note = 2' Fluoro-guanosine
  modified_base 7: mod_base = OTHER; note = 2'O-methyl-uridine
  modified_base 8: mod_base = OTHER; note = 2' Fluoro-uridine
  modified_base 9: mod_base = OTHER; note = 2' Fluoro-uridine
  modified_base 10: mod_base = OTHER; note = 2'O-methyl-guanosine
  modified_base 11: mod_base = OTHER; note = 2'O-methyl-uridine
  modified_base 12: mod_base = OTHER; note = 2'O-methyl-cytidine
  modified_base 13: mod_base = OTHER; note = 2'O-methyl-adenosine
  modified_base 14: mod_base = OTHER; note = 2' Fluoro-uridine
  modified_base 15: mod_base = OTHER; note = 2'O-methyl-guanosine
  modified_base 16: mod_base = OTHER; note = 2' Fluoro-cytidine
  modified_base 17: mod_base = OTHER; note = 2'O-methyl-uridine
  modified_base 18: mod_base = OTHER; note = 2'O-methyl-uridine
  modified_base 19: mod_base = OTHER; note = 2'O-methyl-uridine
  modified_base 20: mod_base = OTHER; note = 2'O-methyl-uridine
  modified_base 21: mod_base = OTHER; note = 2'O-methyl-uridine
  modified_base 22: mod_base = OTHER; note = 2'O-methyl-uridine
  modified_base 23: mod_base = OTHER; note = 2'O-methyl-guanosine
  modified_base 1..2: mod_base = OTHER; note = phosphorothioate linkage
  modified_base 2..3: mod_base = OTHER; note = phosphorothioate linkage
  modified_base 21..22: mod_base = OTHER; note = phosphorothioate linkage
  modified_base 22..23: mod_base = OTHER; note = phosphorothioate linkage
  source 1..23: mol_type = other RNA
gttctgtttgtcatgcttttttg

SEQ ID NO: 162 - RNA, 23 nt, synthetic construct
  misc_feature 1..23: note = Description of origin: HCII siRNA antisense strands
  misc_feature 1..23: note = Description of source:Antisense strand ID:
  modified_base 1: mod_base = OTHER; note = 2'O-methyl-guanosine
  modified_base 2: mod_base = OTHER; note = 2' Fluoro-guanosine
  modified_base 3: mod_base = OTHER; note = 2'O-methyl-cytidine
  modified_base 4: mod_base = OTHER; note = 2' Fluoro-cytidine
  modified_base 5: mod_base = OTHER; note = 2'O-methyl-uridine
  modified_base 6: mod_base = OTHER; note = 2' Fluoro-cytidine
  modified_base 7: mod_base = OTHER; note = 2'O-methyl-adenosine
  modified_base 8: mod_base = OTHER; note = 2' Fluoro-guanosine
  modified_base 9: mod_base = OTHER; note = 2' Fluoro-cytidine
  modified_base 10: mod_base = OTHER; note = 2'O-methyl-adenosine
  modified_base 11: mod_base = OTHER; note = 2'O-methyl-adenosine
  modified_base 12: mod_base = OTHER; note = 2'O-methyl-adenosine
  modified_base 13: mod_base = OTHER; note = 2'O-methyl-guanosine
  modified_base 14: mod_base = OTHER; note = 2' Fluoro-uridine
  modified_base 15: mod_base = OTHER; note = 2'O-methyl-adenosine
  modified_base 16: mod_base = OTHER; note = 2'Fluoro-adenosine
  modified_base 17: mod_base = OTHER; note = 2'O-methyl-uridine
  modified_base 18: mod_base = OTHER; note = 2'O-methyl-adenosine
  modified_base 19: mod_base = OTHER; note = 2'O-methyl-cytidine
  modified_base 20: mod_base = OTHER; note = 2'O-methyl-uridine
  modified_base 21: mod_base = OTHER; note = 2'O-methyl-cytidine
  modified_base 22: mod_base = OTHER; note = 2'O-methyl-uridine
  modified_base 23: mod_base = OTHER; note = 2'O-methyl-cytidine
  modified_base 1..2: mod_base = OTHER; note = phosphorothioate linkage
  modified_base 2..3: mod_base = OTHER; note = phosphorothioate linkage
  modified_base 21..22: mod_base = OTHER; note = phosphorothioate linkage
  modified_base 22..23: mod_base = OTHER; note = phosphorothioate linkage
  source 1..23: mol_type = other RNA
ggcctcagcaaagtaatactctc

SEQ ID NO: 163 - RNA, 23 nt, synthetic construct
  misc_feature 1..23: note = Description of origin: HCII siRNA antisense strands
  misc_feature 1..23: note = Description of source:Antisense strand ID:
  modified_base 1: mod_base = OTHER; note = 2'O-methyl-uridine
  modified_base 2: mod_base = OTHER; note = 2' Fluoro-uridine
  modified_base 3: mod_base = OTHER; note = 2'O-methyl-uridine
  modified_base 4: mod_base = OTHER; note = 2' Fluoro-cytidine
  modified_base 5: mod_base = OTHER; note = 2'O-methyl-cytidine
  modified_base 6: mod_base = OTHER; note = 2'Fluoro-adenosine
  modified_base 7: mod_base = OTHER; note = 2'O-methyl-cytidine
  modified_base 8: mod_base = OTHER; note = 2' Fluoro-uridine
  modified_base 9: mod_base = OTHER; note = 2' Fluoro-guanosine
  modified_base 10: mod_base = OTHER; note = 2'O-methyl-guanosine
  modified_base 11: mod_base = OTHER; note = 2'O-methyl-guanosine
  modified_base 12: mod_base = OTHER; note = 2'O-methyl-adenosine
  modified_base 13: mod_base = OTHER; note = 2'O-methyl-adenosine
  modified_base 14: mod_base = OTHER; note = 2' Fluoro-uridine
  modified_base 15: mod_base = OTHER; note = 2'O-methyl-uridine
  modified_base 16: mod_base = OTHER; note = 2' Fluoro-uridine
  modified_base 17: mod_base = OTHER; note = 2'O-methyl-adenosine
  modified_base 18: mod_base = OTHER; note = 2'O-methyl-uridine
  modified_base 19: mod_base = OTHER; note = 2'O-methyl-uridine
  modified_base 20: mod_base = OTHER; note = 2'O-methyl-cytidine
  modified_base 21: mod_base = OTHER; note = 2'O-methyl-adenosine
  modified_base 22: mod_base = OTHER; note = 2'O-methyl-cytidine
  modified_base 23: mod_base = OTHER; note = 2'O-methyl-cytidine
  modified_base 1..2: mod_base = OTHER; note = phosphorothioate linkage
  modified_base 2..3: mod_base = OTHER; note = phosphorothioate linkage
  modified_base 21..22: mod_base = OTHER; note = phosphorothioate linkage
  modified_base 22..23: mod_base = OTHER; note = phosphorothioate linkage
  source 1..23: mol_type = other RNA
tttccactgggaatttattcacc

SEQ ID NO: 164 - RNA, 23 nt, synthetic construct
  misc_feature 1..23: note = Description of origin: HCII siRNA antisense strands
  misc_feature 1..23: note = Description of source:Antisense strand ID:
  modified_base 1: mod_base = OTHER; note = 2'O-methyl-guanosine
  modified_base 2: mod_base = OTHER; note = 2'Fluoro-adenosine
  modified_base 3: mod_base = OTHER; note = 2'O-methyl-uridine
  modified_base 4: mod_base = OTHER; note = 2' Fluoro-cytidine
  modified_base 5: mod_base = OTHER; note = 2'O-methyl-cytidine
  modified_base 6: mod_base = OTHER; note = 2' Fluoro-uridine
  modified_base 7: mod_base = OTHER; note = 2'O-methyl-uridine
  modified_base 8: mod_base = OTHER; note = 2' Fluoro-uridine
  modified_base 9: mod_base = OTHER; note = 2' Fluoro-guanosine
  modified_base 10: mod_base = OTHER; note = 2'O-methyl-adenosine
  modified_base 11: mod_base = OTHER; note = 2'O-methyl-adenosine
  modified_base 12: mod_base = OTHER; note = 2'O-methyl-guanosine
  modified_base 13: mod_base = OTHER; note = 2'O-methyl-uridine
  modified_base 14: mod_base = OTHER; note = 2'Fluoro-adenosine
  modified_base 15: mod_base = OTHER; note = 2'O-methyl-guanosine
  modified_base 16: mod_base = OTHER; note = 2'Fluoro-adenosine
  modified_base 17: mod_base = OTHER; note = 2'O-methyl-uridine
  modified_base 18: mod_base = OTHER; note = 2'O-methyl-guanosine
  modified_base 19: mod_base = OTHER; note = 2'O-methyl-cytidine
  modified_base 20: mod_base = OTHER; note = 2'O-methyl-adenosine
  modified_base 21: mod_base = OTHER; note = 2'O-methyl-guanosine
  modified_base 22: mod_base = OTHER; note = 2'O-methyl-uridine
  modified_base 23: mod_base = OTHER; note = 2'O-methyl-uridine
  modified_base 1..2: mod_base = OTHER; note = phosphorothioate linkage
  modified_base 2..3: mod_base = OTHER; note = phosphorothioate linkage
  modified_base 21..22: mod_base = OTHER; note = phosphorothioate linkage
  modified_base 22..23: mod_base = OTHER; note = phosphorothioate linkage
  source 1..23: mol_type = other RNA
gatcctttgaagtagatgcagtt

SEQ ID NO: 165 - RNA, 23 nt, synthetic construct
  misc_feature 1..23: note = Description of origin: HCII siRNA antisense strands
  misc_feature 1..23: note = Description of source:Antisense strand ID:
  modified_base 1: mod_base = OTHER; note = 2'O-methyl-adenosine
  modified_base 2: mod_base = OTHER; note = 2' Fluoro-uridine
  modified_base 3: mod_base = OTHER; note = 2'O-methyl-cytidine
  modified_base 4: mod_base = OTHER; note = 2' Fluoro-cytidine
  modified_base 5: mod_base = OTHER; note = 2'O-methyl-uridine
  modified_base 6: mod_base = OTHER; note = 2' Fluoro-uridine
  modified_base 7: mod_base = OTHER; note = 2'O-methyl-uridine
  modified_base 8: mod_base = OTHER; note = 2' Fluoro-guanosine
  modified_base 9: mod_base = OTHER; note = 2'Fluoro-adenosine
  modified_base 10: mod_base = OTHER; note = 2'O-methyl-adenosine
  modified_base 11: mod_base = OTHER; note = 2'O-methyl-guanosine
  modified_base 12: mod_base = OTHER; note = 2'O-methyl-uridine
  modified_base 13: mod_base = OTHER; note = 2'O-methyl-adenosine
  modified_base 14: mod_base = OTHER; note = 2' Fluoro-guanosine
  modified_base 15: mod_base = OTHER; note = 2'O-methyl-adenosine
  modified_base 16: mod_base = OTHER; note = 2' Fluoro-uridine
  modified_base 17: mod_base = OTHER; note = 2'O-methyl-guanosine
  modified_base 18: mod_base = OTHER; note = 2'O-methyl-cytidine
  modified_base 19: mod_base = OTHER; note = 2'O-methyl-adenosine
  modified_base 20: mod_base = OTHER; note = 2'O-methyl-guanosine
  modified_base 21: mod_base = OTHER; note = 2'O-methyl-uridine
  modified_base 22: mod_base = OTHER; note = 2'O-methyl-uridine
  modified_base 23: mod_base = OTHER; note = 2'O-methyl-guanosine
  modified_base 1..2: mod_base = OTHER; note = phosphorothioate linkage
  modified_base 2..3: mod_base = OTHER; note = phosphorothioate linkage
  modified_base 21..22: mod_base = OTHER; note = phosphorothioate linkage
  modified_base 22..23: mod_base = OTHER; note = phosphorothioate linkage
  source 1..23: mol_type = other RNA
atcctttgaagtagatgcagttg

SEQ ID NO: 166 - RNA, 23 nt, synthetic construct
  misc_feature 1..23: note = Description of origin: HCII siRNA antisense strands
  misc_feature 1..23: note = Description of source:Antisense strand ID:
  modified_base 1: mod_base = OTHER; note = 2'O-methyl-adenosine
  modified_base 2: mod_base = OTHER; note = 2' Fluoro-cytidine
  modified_base 3: mod_base = OTHER; note = 2'O-methyl-uridine
  modified_base 4: mod_base = OTHER; note = 2' Fluoro-uridine
  modified_base 5: mod_base = OTHER; note = 2'O-methyl-guanosine
  modified_base 6: mod_base = OTHER; note = 2' Fluoro-uridine
  modified_base 7: mod_base = OTHER; note = 2'O-methyl-uridine
  modified_base 8: mod_base = OTHER; note = 2' Fluoro-cytidine
  modified_base 9: mod_base = OTHER; note = 2'Fluoro-adenosine
  modified_base 10: mod_base = OTHER; note = 2'O-methyl-uridine
  modified_base 11: mod_base = OTHER; note = 2'O-methyl-guanosine
  modified_base 12: mod_base = OTHER; note = 2'O-methyl-guanosine
  modified_base 13: mod_base = OTHER; note = 2'O-methyl-guanosine
  modified_base 14: mod_base = OTHER; note = 2' Fluoro-uridine
  modified_base 15: mod_base = OTHER; note = 2'O-methyl-cytidine
  modified_base 16: mod_base = OTHER; note = 2' Fluoro-uridine
  modified_base 17: mod_base = OTHER; note = 2'O-methyl-cytidine
  modified_base 18: mod_base = OTHER; note = 2'O-methyl-uridine
  modified_base 19: mod_base = OTHER; note = 2'O-methyl-cytidine
  modified_base 20: mod_base = OTHER; note = 2'O-methyl-cytidine
  modified_base 21: mod_base = OTHER; note = 2'O-methyl-cytidine
  modified_base 22: mod_base = OTHER; note = 2'O-methyl-uridine
  modified_base 23: mod_base = OTHER; note = 2'O-methyl-uridine
  modified_base 1..2: mod_base = OTHER; note = phosphorothioate linkage
  modified_base 2..3: mod_base = OTHER; note = phosphorothioate linkage
  modified_base 21..22: mod_base = OTHER; note = phosphorothioate linkage
  modified_base 22..23: mod_base = OTHER; note = phosphorothioate linkage
  source 1..23: mol_type = other RNA
acttgttcatgggtctctccctt

SEQ ID NO: 167 - RNA, 23 nt, synthetic construct
  misc_feature 1..23: note = Description of origin: HCII siRNA antisense strands
  misc_feature 1..23: note = Description of source:Antisense strand ID:
  modified_base 1: mod_base = OTHER; note = 2'O-methyl-uridine
  modified_base 2: mod_base = OTHER; note = 2' Fluoro-cytidine
  modified_base 3: mod_base = OTHER; note = 2'O-methyl-cytidine
  modified_base 4: mod_base = OTHER; note = 2'Fluoro-adenosine
  modified_base 5: mod_base = OTHER; note = 2'O-methyl-cytidine
  modified_base 6: mod_base = OTHER; note = 2' Fluoro-uridine
  modified_base 7: mod_base = OTHER; note = 2'O-methyl-guanosine
  modified_base 8: mod_base = OTHER; note = 2' Fluoro-guanosine
  modified_base 9: mod_base = OTHER; note = 2' Fluoro-guanosine
  modified_base 10: mod_base = OTHER; note = 2'O-methyl-adenosine
  modified_base 11: mod_base = OTHER; note = 2'O-methyl-adenosine
  modified_base 12: mod_base = OTHER; note = 2'O-methyl-uridine
  modified_base 13: mod_base = OTHER; note = 2'O-methyl-uridine
  modified_base 14: mod_base = OTHER; note = 2' Fluoro-uridine
  modified_base 15: mod_base = OTHER; note = 2'O-methyl-adenosine
  modified_base 16: mod_base = OTHER; note = 2' Fluoro-uridine
  modified_base 17: mod_base = OTHER; note = 2'O-methyl-uridine
  modified_base 18: mod_base = OTHER; note = 2'O-methyl-cytidine
  modified_base 19: mod_base = OTHER; note = 2'O-methyl-adenosine
  modified_base 20: mod_base = OTHER; note = 2'O-methyl-cytidine
  modified_base 21: mod_base = OTHER; note = 2'O-methyl-cytidine
  modified_base 22: mod_base = OTHER; note = 2'O-methyl-cytidine
  modified_base 23: mod_base = OTHER; note = 2'O-methyl-adenosine
  modified_base 1..2: mod_base = OTHER; note = phosphorothioate linkage
  modified_base 2..3: mod_base = OTHER; note = phosphorothioate linkage
  modified_base 21..22: mod_base = OTHER; note = phosphorothioate linkage
  modified_base 22..23: mod_base = OTHER; note = phosphorothioate linkage
  source 1..23: mol_type = other RNA
tccactgggaatttattcaccca

SEQ ID NO: 168 - RNA, 23 nt, synthetic construct
  misc_feature 1..23: note = Description of origin: HCII siRNA antisense strands
  misc_feature 1..23: note = Description of source:Antisense strand ID:
  modified_base 1: mod_base = OTHER; note = 2'O-methyl-uridine
  modified_base 2: mod_base = OTHER; note = 2' Fluoro-guanosine
  modified_base 3: mod_base = OTHER; note = 2'O-methyl-uridine
  modified_base 4: mod_base = OTHER; note = 2'Fluoro-adenosine
  modified_base 5: mod_base = OTHER; note = 2'O-methyl-cytidine
  modified_base 6: mod_base = OTHER; note = 2' Fluoro-cytidine
  modified_base 7: mod_base = OTHER; note = 2'O-methyl-cytidine
  modified_base 8: mod_base = OTHER; note = 2'Fluoro-adenosine
  modified_base 9: mod_base = OTHER; note = 2'Fluoro-adenosine
  modified_base 10: mod_base = OTHER; note = 2'O-methyl-adenosine
  modified_base 11: mod_base = OTHER; note = 2'O-methyl-adenosine
  modified_base 12: mod_base = OTHER; note = 2'O-methyl-uridine
  modified_base 13: mod_base = OTHER; note = 2'O-methyl-uridine
  modified_base 14: mod_base = OTHER; note = 2' Fluoro-cytidine
  modified_base 15: mod_base = OTHER; note = 2'O-methyl-cytidine
  modified_base 16: mod_base = OTHER; note = 2' Fluoro-uridine
  modified_base 17: mod_base = OTHER; note = 2'O-methyl-cytidine
  modified_base 18: mod_base = OTHER; note = 2'O-methyl-cytidine
  modified_base 19: mod_base = OTHER; note = 2'O-methyl-uridine
  modified_base 20: mod_base = OTHER; note = 2'O-methyl-guanosine
  modified_base 21: mod_base = OTHER; note = 2'O-methyl-adenosine
  modified_base 22: mod_base = OTHER; note = 2'O-methyl-adenosine
  modified_base 23: mod_base = OTHER; note = 2'O-methyl-guanosine
  modified_base 1..2: mod_base = OTHER; note = phosphorothioate linkage
  modified_base 2..3: mod_base = OTHER; note = phosphorothioate linkage
  modified_base 21..22: mod_base = OTHER; note = phosphorothioate linkage
  modified_base 22..23: mod_base = OTHER; note = phosphorothioate linkage
  source 1..23: mol_type = other RNA
tgtacccaaaattcctcctgaag

SEQ ID NO: 169 - RNA, 23 nt, synthetic construct
  misc_feature 1..23: note = Description of origin: HCII siRNA antisense strands
  misc_feature 1..23: note = Description of source:Antisense strand ID:
  modified_base 1: mod_base = OTHER; note = 2'O-methyl-uridine
  modified_base 2: mod_base = OTHER; note = 2' Fluoro-uridine
  modified_base 3: mod_base = OTHER; note = 2'O-methyl-cytidine
  modified_base 4: mod_base = OTHER; note = 2' Fluoro-cytidine
  modified_base 5: mod_base = OTHER; note = 2'O-methyl-cytidine
  modified_base 6: mod_base = OTHER; note = 2'Fluoro-adenosine
  modified_base 7: mod_base = OTHER; note = 2'O-methyl-uridine
  modified_base 8: mod_base = OTHER; note = 2' Fluoro-guanosine
  modified_base 9: mod_base = OTHER; note = 2'Fluoro-adenosine
  modified_base 10: mod_base = OTHER; note = 2'O-methyl-adenosine
  modified_base 11: mod_base = OTHER; note = 2'O-methyl-guanosine
  modified_base 12: mod_base = OTHER; note = 2'O-methyl-adenosine
  modified_base 13: mod_base = OTHER; note = 2'O-methyl-guanosine
  modified_base 14: mod_base = OTHER; note = 2' Fluoro-cytidine
  modified_base 15: mod_base = OTHER; note = 2'O-methyl-adenosine
  modified_base 16: mod_base = OTHER; note = 2' Fluoro-guanosine
  modified_base 17: mod_base = OTHER; note = 2'O-methyl-guanosine
  modified_base 18: mod_base = OTHER; note = 2'O-methyl-cytidine
  modified_base 19: mod_base = OTHER; note = 2'O-methyl-adenosine
  modified_base 20: mod_base = OTHER; note = 2'O-methyl-guanosine
  modified_base 21: mod_base = OTHER; note = 2'O-methyl-cytidine
  modified_base 22: mod_base = OTHER; note = 2'O-methyl-uridine
  modified_base 23: mod_base = OTHER; note = 2'O-methyl-guanosine
  modified_base 1..2: mod_base = OTHER; note = phosphorothioate linkage
  modified_base 2..3: mod_base = OTHER; note = phosphorothioate linkage
  modified_base 21..22: mod_base = OTHER; note = phosphorothioate linkage
  modified_base 22..23: mod_base = OTHER; note = phosphorothioate linkage
  source 1..23: mol_type = other RNA
ttcccatgaagagcaggcagctg

SEQ ID NO: 170 - RNA, 23 nt, synthetic construct
  misc_feature 1..23: note = Description of origin: HCII siRNA antisense strands
  misc_feature 1..23: note = Description of source:Antisense strand ID:
  modified_base 1: mod_base = OTHER; note = 2'O-methyl-uridine
  modified_base 2: mod_base = OTHER; note = 2' Fluoro-cytidine
  modified_base 3: mod_base = OTHER; note = 2'O-methyl-uridine
  modified_base 4: mod_base = OTHER; note = 2' Fluoro-uridine
  modified_base 5: mod_base = OTHER; note = 2'O-methyl-uridine
  modified_base 6: mod_base = OTHER; note = 2' Fluoro-uridine
  modified_base 7: mod_base = OTHER; note = 2'O-methyl-adenosine
  modified_base 8: mod_base = OTHER; note = 2' Fluoro-uridine
  modified_base 9: mod_base = OTHER; note = 2' Fluoro-guanosine
  modified_base 10: mod_base = OTHER; note = 2'O-methyl-adenosine
  modified_base 11: mod_base = OTHER; note = 2'O-methyl-guanosine
  modified_base 12: mod_base = OTHER; note = 2'O-methyl-guanosine
  modified_base 13: mod_base = OTHER; note = 2'O-methyl-cytidine
  modified_base 14: mod_base = OTHER; note = 2' Fluoro-cytidine
  modified_base 15: mod_base = OTHER; note = 2'O-methyl-cytidine
  modified_base 16: mod_base = OTHER; note = 2' Fluoro-uridine
  modified_base 17: mod_base = OTHER; note = 2'O-methyl-uridine
  modified_base 18: mod_base = OTHER; note = 2'O-methyl-guanosine
  modified_base 19: mod_base = OTHER; note = 2'O-methyl-guanosine
  modified_base 20: mod_base = OTHER; note = 2'O-methyl-uridine
  modified_base 21: mod_base = OTHER; note = 2'O-methyl-guanosine
  modified_base 22: mod_base = OTHER; note = 2'O-methyl-adenosine
  modified_base 23: mod_base = OTHER; note = 2'O-methyl-guanosine
  modified_base 1..2: mod_base = OTHER; note = phosphorothioate linkage
  modified_base 2..3: mod_base = OTHER; note = phosphorothioate linkage
  modified_base 21..22: mod_base = OTHER; note = phosphorothioate linkage
  modified_base 22..23: mod_base = OTHER; note = phosphorothioate linkage
  source 1..23: mol_type = other RNA
tcttttatgaggcccttggtgag

SEQ ID NO: 171 - RNA, 23 nt, synthetic construct
  misc_feature 1..23: note = Description of origin: HCII siRNA antisense strands
  misc_feature 1..23: note = Description of source:Antisense strand ID:
  modified_base 1: mod_base = OTHER; note = 2'O-methyl-adenosine
  modified_base 2: mod_base = OTHER; note = 2'Fluoro-adenosine
  modified_base 3: mod_base = OTHER; note = 2'O-methyl-cytidine
  modified_base 4: mod_base = OTHER; note = 2' Fluoro-uridine
  modified_base 5: mod_base = OTHER; note = 2'O-methyl-guanosine
  modified_base 6: mod_base = OTHER; note = 2' Fluoro-cytidine
  modified_base 7: mod_base = OTHER; note = 2'O-methyl-uridine
  modified_base 8: mod_base = OTHER; note = 2' Fluoro-uridine
  modified_base 9: mod_base = OTHER; note = 2' Fluoro-cytidine
  modified_base 10: mod_base = OTHER; note = 2'O-methyl-uridine
  modified_base 11: mod_base = OTHER; note = 2'O-methyl-guanosine
  modified_base 12: mod_base = OTHER; note = 2'O-methyl-guanosine
  modified_base 13: mod_base = OTHER; note = 2'O-methyl-adenosine
  modified_base 14: mod_base = OTHER; note = 2' Fluoro-uridine
  modified_base 15: mod_base = OTHER; note = 2'O-methyl-adenosine
  modified_base 16: mod_base = OTHER; note = 2' Fluoro-uridine
  modified_base 17: mod_base = OTHER; note = 2'O-methyl-adenosine
  modified_base 18: mod_base = OTHER; note = 2'O-methyl-adenosine
  modified_base 19: mod_base = OTHER; note = 2'O-methyl-adenosine
  modified_base 20: mod_base = OTHER; note = 2'O-methyl-guanosine
  modified_base 21: mod_base = OTHER; note = 2'O-methyl-guanosine
  modified_base 22: mod_base = OTHER; note = 2'O-methyl-uridine
  modified_base 23: mod_base = OTHER; note = 2'O-methyl-cytidine
  modified_base 1..2: mod_base = OTHER; note = phosphorothioate linkage
  modified_base 2..3: mod_base = OTHER; note = phosphorothioate linkage
  modified_base 21..22: mod_base = OTHER; note = phosphorothioate linkage
  modified_base 22..23: mod_base = OTHER; note = phosphorothioate linkage
  source 1..23: mol_type = other RNA
aactgcttctggatataaaggtc

SEQ ID NO: 172 - RNA, 23 nt, synthetic construct
  misc_feature 1..23: note = Description of origin: HCII siRNA antisense strands
  misc_feature 1..23: note = Description of source:Antisense strand ID:
  modified_base 1: mod_base = OTHER; note = 2'O-methyl-cytidine
  modified_base 2: mod_base = OTHER; note = 2' Fluoro-cytidine
  modified_base 3: mod_base = OTHER; note = 2'O-methyl-uridine
  modified_base 4: mod_base = OTHER; note = 2' Fluoro-uridine
  modified_base 5: mod_base = OTHER; note = 2'O-methyl-uridine
  modified_base 6: mod_base = OTHER; note = 2' Fluoro-guanosine
  modified_base 7: mod_base = OTHER; note = 2'O-methyl-adenosine
  modified_base 8: mod_base = OTHER; note = 2'Fluoro-adenosine
  modified_base 9: mod_base = OTHER; note = 2' Fluoro-guanosine
  modified_base 10: mod_base = OTHER; note = 2'O-methyl-uridine
  modified_base 11: mod_base = OTHER; note = 2'O-methyl-adenosine
  modified_base 12: mod_base = OTHER; note = 2'O-methyl-guanosine
  modified_base 13: mod_base = OTHER; note = 2'O-methyl-adenosine
  modified_base 14: mod_base = OTHER; note = 2' Fluoro-uridine
  modified_base 15: mod_base = OTHER; note = 2'O-methyl-guanosine
  modified_base 16: mod_base = OTHER; note = 2' Fluoro-cytidine
  modified_base 17: mod_base = OTHER; note = 2'O-methyl-adenosine
  modified_base 18: mod_base = OTHER; note = 2'O-methyl-guanosine
  modified_base 19: mod_base = OTHER; note = 2'O-methyl-uridine
  modified_base 20: mod_base = OTHER; note = 2'O-methyl-uridine
  modified_base 21: mod_base = OTHER; note = 2'O-methyl-guanosine
  modified_base 22: mod_base = OTHER; note = 2'O-methyl-adenosine
  modified_base 23: mod_base = OTHER; note = 2'O-methyl-guanosine
  modified_base 1..2: mod_base = OTHER; note = phosphorothioate linkage
  modified_base 2..3: mod_base = OTHER; note = phosphorothioate linkage
  modified_base 21..22: mod_base = OTHER; note = phosphorothioate linkage
  modified_base 22..23: mod_base = OTHER; note = phosphorothioate linkage
  source 1..23: mol_type = other RNA
cctttgaagtagatgcagttgag

SEQ ID NO: 173 - RNA, 23 nt, synthetic construct
  misc_feature 1..23: note = Description of origin: HCII siRNA antisense strands
  misc_feature 1..23: note = Description of source:Antisense strand ID:
  modified_base 1: mod_base = OTHER; note = 2'O-methyl-uridine
  modified_base 2: mod_base = OTHER; note = 2' Fluoro-uridine
  modified_base 3: mod_base = OTHER; note = 2'O-methyl-adenosine
  modified_base 4: mod_base = OTHER; note = 2'Fluoro-adenosine
  modified_base 5: mod_base = OTHER; note = 2'O-methyl-guanosine
  modified_base 6: mod_base = OTHER; note = 2'Fluoro-adenosine
  modified_base 7: mod_base = OTHER; note = 2'O-methyl-cytidine
  modified_base 8: mod_base = OTHER; note = 2' Fluoro-guanosine
  modified_base 9: mod_base = OTHER; note = 2' Fluoro-cytidine
  modified_base 10: mod_base = OTHER; note = 2'O-methyl-uridine
  modified_base 11: mod_base = OTHER; note = 2'O-methyl-guanosine
  modified_base 12: mod_base = OTHER; note = 2'O-methyl-guanosine
  modified_base 13: mod_base = OTHER; note = 2'O-methyl-adenosine
  modified_base 14: mod_base = OTHER; note = 2' Fluoro-uridine
  modified_base 15: mod_base = OTHER; note = 2'O-methyl-cytidine
  modified_base 16: mod_base = OTHER; note = 2' Fluoro-cytidine
  modified_base 17: mod_base = OTHER; note = 2'O-methyl-guanosine
  modified_base 18: mod_base = OTHER; note = 2'O-methyl-guanosine
  modified_base 19: mod_base = OTHER; note = 2'O-methyl-cytidine
  modified_base 20: mod_base = OTHER; note = 2'O-methyl-uridine
  modified_base 21: mod_base = OTHER; note = 2'O-methyl-cytidine
  modified_base 22: mod_base = OTHER; note = 2'O-methyl-uridine
  modified_base 23: mod_base = OTHER; note = 2'O-methyl-uridine
  modified_base 1..2: mod_base = OTHER; note = phosphorothioate linkage
  modified_base 2..3: mod_base = OTHER; note = phosphorothioate linkage
  modified_base 21..22: mod_base = OTHER; note = phosphorothioate linkage
  modified_base 22..23: mod_base = OTHER; note = phosphorothioate linkage
  source 1..23: mol_type = other RNA
ttaagacgctggatccggctctt

SEQ ID NO: 174 - RNA, 23 nt, synthetic construct
  misc_feature 1..23: note = Description of origin: HCII siRNA antisense strands
  misc_feature 1..23: note = Description of source:Antisense strand ID:
  modified_base 1: mod_base = OTHER; note = 2'O-methyl-guanosine
  modified_base 2: mod_base = OTHER; note = 2'Fluoro-adenosine
  modified_base 3: mod_base = OTHER; note = 2'O-methyl-guanosine
  modified_base 4: mod_base = OTHER; note = 2' Fluoro-guanosine
  modified_base 5: mod_base = OTHER; note = 2'O-methyl-adenosine
  modified_base 6: mod_base = OTHER; note = 2' Fluoro-uridine
  modified_base 7: mod_base = OTHER; note = 2'O-methyl-guanosine
  modified_base 8: mod_base = OTHER; note = 2' Fluoro-uridine
  modified_base 9: mod_base = OTHER; note = 2' Fluoro-uridine
  modified_base 10: mod_base = OTHER; note = 2'O-methyl-adenosine
  modified_base 11: mod_base = OTHER; note = 2'O-methyl-adenosine
  modified_base 12: mod_base = OTHER; note = 2'O-methyl-guanosine
  modified_base 13: mod_base = OTHER; note = 2'O-methyl-adenosine
  modified_base 14: mod_base = OTHER; note = 2' Fluoro-cytidine
  modified_base 15: mod_base = OTHER; note = 2'O-methyl-guanosine
  modified_base 16: mod_base = OTHER; note = 2' Fluoro-cytidine
  modified_base 17: mod_base = OTHER; note = 2'O-methyl-uridine
  modified_base 18: mod_base = OTHER; note = 2'O-methyl-guanosine
  modified_base 19: mod_base = OTHER; note = 2'O-methyl-guanosine
  modified_base 20: mod_base = OTHER; note = 2'O-methyl-adenosine
  modified_base 21: mod_base = OTHER; note = 2'O-methyl-uridine
  modified_base 22: mod_base = OTHER; note = 2'O-methyl-cytidine
  modified_base 23: mod_base = OTHER; note = 2'O-methyl-cytidine
  modified_base 1..2: mod_base = OTHER; note = phosphorothioate linkage
  modified_base 2..3: mod_base = OTHER; note = phosphorothioate linkage
  modified_base 21..22: mod_base = OTHER; note = phosphorothioate linkage
  modified_base 22..23: mod_base = OTHER; note = phosphorothioate linkage
  source 1..23: mol_type = other RNA
gaggatgttaagacgctggatcc

SEQ ID NO: 175 - RNA, 23 nt, synthetic construct
  misc_feature 1..23: note = Description of origin: HCII siRNA antisense strands
  misc_feature 1..23: note = Description of source:Antisense strand ID:
  modified_base 1: mod_base = OTHER; note = 2'O-methyl-uridine
  modified_base 2: mod_base = OTHER; note = 2' Fluoro-cytidine
  modified_base 3: mod_base = OTHER; note = 2'O-methyl-uridine
  modified_base 4: mod_base = OTHER; note = 2' Fluoro-guanosine
  modified_base 5: mod_base = OTHER; note = 2'O-methyl-uridine
  modified_base 6: mod_base = OTHER; note = 2' Fluoro-uridine
  modified_base 7: mod_base = OTHER; note = 2'O-methyl-uridine
  modified_base 8: mod_base = OTHER; note = 2' Fluoro-guanosine
  modified_base 9: mod_base = OTHER; note = 2' Fluoro-uridine
  modified_base 10: mod_base = OTHER; note = 2'O-methyl-cytidine
  modified_base 11: mod_base = OTHER; note = 2'O-methyl-adenosine
  modified_base 12: mod_base = OTHER; note = 2'O-methyl-uridine
  modified_base 13: mod_base = OTHER; note = 2'O-methyl-guanosine
  modified_base 14: mod_base = OTHER; note = 2' Fluoro-cytidine
  modified_base 15: mod_base = OTHER; note = 2'O-methyl-uridine
  modified_base 16: mod_base = OTHER; note = 2' Fluoro-uridine
  modified_base 17: mod_base = OTHER; note = 2'O-methyl-uridine
  modified_base 18: mod_base = OTHER; note = 2'O-methyl-uridine
  modified_base 19: mod_base = OTHER; note = 2'O-methyl-uridine
  modified_base 20: mod_base = OTHER; note = 2'O-methyl-uridine
  modified_base 21: mod_base = OTHER; note = 2'O-methyl-guanosine
  modified_base 22: mod_base = OTHER; note = 2'O-methyl-cytidine
  modified_base 23: mod_base = OTHER; note = 2'O-methyl-cytidine
  modified_base 1..2: mod_base = OTHER; note = phosphorothioate linkage
  modified_base 2..3: mod_base = OTHER; note = phosphorothioate linkage
  modified_base 21..22: mod_base = OTHER; note = phosphorothioate linkage
  modified_base 22..23: mod_base = OTHER; note = phosphorothioate linkage
  source 1..23: mol_type = other RNA
tctgtttgtcatgcttttttgcc

SEQ ID NO: 176 - RNA, 23 nt, synthetic construct
  misc_feature 1..23: note = Description of origin: HCII siRNA antisense strands
  misc_feature 1..23: note = Description of source:Antisense strand ID:
  modified_base 1: mod_base = OTHER; note = 2'O-methyl-guanosine
  modified_base 2: mod_base = OTHER; note = 2' Fluoro-uridine
  modified_base 3: mod_base = OTHER; note = 2'O-methyl-guanosine
  modified_base 4: mod_base = OTHER; note = 2' Fluoro-uridine
  modified_base 5: mod_base = OTHER; note = 2'O-methyl-adenosine
  modified_base 6: mod_base = OTHER; note = 2' Fluoro-cytidine
  modified_base 7: mod_base = OTHER; note = 2'O-methyl-cytidine
  modified_base 8: mod_base = OTHER; note = 2' Fluoro-cytidine
  modified_base 9: mod_base = OTHER; note = 2'Fluoro-adenosine
  modified_base 10: mod_base = OTHER; note = 2'O-methyl-adenosine
  modified_base 11: mod_base = OTHER; note = 2'O-methyl-adenosine
  modified_base 12: mod_base = OTHER; note = 2'O-methyl-adenosine
  modified_base 13: mod_base = OTHER; note = 2'O-methyl-uridine
  modified_base 14: mod_base = OTHER; note = 2' Fluoro-uridine
  modified_base 15: mod_base = OTHER; note = 2'O-methyl-cytidine
  modified_base 16: mod_base = OTHER; note = 2' Fluoro-cytidine
  modified_base 17: mod_base = OTHER; note = 2'O-methyl-uridine
  modified_base 18: mod_base = OTHER; note = 2'O-methyl-cytidine
  modified_base 19: mod_base = OTHER; note = 2'O-methyl-cytidine
  modified_base 20: mod_base = OTHER; note = 2'O-methyl-uridine
  modified_base 21: mod_base = OTHER; note = 2'O-methyl-guanosine
  modified_base 22: mod_base = OTHER; note = 2'O-methyl-adenosine
  modified_base 23: mod_base = OTHER; note = 2'O-methyl-adenosine
  modified_base 1..2: mod_base = OTHER; note = phosphorothioate linkage
  modified_base 2..3: mod_base = OTHER; note = phosphorothioate linkage
  modified_base 21..22: mod_base = OTHER; note = phosphorothioate linkage
  modified_base 22..23: mod_base = OTHER; note = phosphorothioate linkage
  source 1..23: mol_type = other RNA
gtgtacccaaaattcctcctgaa

SEQ ID NO: 177 - RNA, 23 nt, synthetic construct
  misc_feature 1..23: note = Description of origin: HCII siRNA antisense strands
  misc_feature 1..23: note = Description of source:Antisense strand ID:
  modified_base 1: mod_base = OTHER; note = 2'O-methyl-uridine
  modified_base 2: mod_base = OTHER; note = 2' Fluoro-uridine
  modified_base 3: mod_base = OTHER; note = 2'O-methyl-cytidine
  modified_base 4: mod_base = OTHER; note = 2'Fluoro-adenosine
  modified_base 5: mod_base = OTHER; note = 2'O-methyl-guanosine
  modified_base 6: mod_base = OTHER; note = 2' Fluoro-cytidine
  modified_base 7: mod_base = OTHER; note = 2'O-methyl-cytidine
  modified_base 8: mod_base = OTHER; note = 2' Fluoro-guanosine
  modified_base 9: mod_base = OTHER; note = 2' Fluoro-guanosine
  modified_base 10: mod_base = OTHER; note = 2'O-methyl-adenosine
  modified_base 11: mod_base = OTHER; note = 2'O-methyl-adenosine
  modified_base 12: mod_base = OTHER; note = 2'O-methyl-guanosine
  modified_base 13: mod_base = OTHER; note = 2'O-methyl-uridine
  modified_base 14: mod_base = OTHER; note = 2' Fluoro-uridine
  modified_base 15: mod_base = OTHER; note = 2'O-methyl-guanosine
  modified_base 16: mod_base = OTHER; note = 2' Fluoro-uridine
  modified_base 17: mod_base = OTHER; note = 2'O-methyl-guanosine
  modified_base 18: mod_base = OTHER; note = 2'O-methyl-guanosine
  modified_base 19: mod_base = OTHER; note = 2'O-methyl-uridine
  modified_base 20: mod_base = OTHER; note = 2'O-methyl-uridine
  modified_base 21: mod_base = OTHER; note = 2'O-methyl-guanosine
  modified_base 22: mod_base = OTHER; note = 2'O-methyl-uridine
  modified_base 23: mod_base = OTHER; note = 2'O-methyl-guanosine
  modified_base 1..2: mod_base = OTHER; note = phosphorothioate linkage
  modified_base 2..3: mod_base = OTHER; note = phosphorothioate linkage
  modified_base 21..22: mod_base = OTHER; note = phosphorothioate linkage
  modified_base 22..23: mod_base = OTHER; note = phosphorothioate linkage
  source 1..23: mol_type = other RNA
ttcagccggaagttgtggttgtg

SEQ ID NO: 178 - RNA, 23 nt, synthetic construct
  misc_feature 1..23: note = Description of origin: HCII siRNA antisense strands
  misc_feature 1..23: note = Description of source:Antisense strand ID:
  modified_base 1: mod_base = OTHER; note = 2'O-methyl-uridine
  modified_base 2: mod_base = OTHER; note = 2' Fluoro-guanosine
  modified_base 3: mod_base = OTHER; note = 2'O-methyl-uridine
  modified_base 4: mod_base = OTHER; note = 2' Fluoro-uridine
  modified_base 5: mod_base = OTHER; note = 2'O-methyl-uridine
  modified_base 6: mod_base = OTHER; note = 2' Fluoro-guanosine
  modified_base 7: mod_base = OTHER; note = 2'O-methyl-uridine
  modified_base 8: mod_base = OTHER; note = 2' Fluoro-cytidine
  modified_base 9: mod_base = OTHER; note = 2'Fluoro-adenosine
  modified_base 10: mod_base = OTHER; note = 2'O-methyl-uridine
  modified_base 11: mod_base = OTHER; note = 2'O-methyl-guanosine
  modified_base 12: mod_base = OTHER; note = 2'O-methyl-cytidine
  modified_base 13: mod_base = OTHER; note = 2'O-methyl-uridine
  modified_base 14: mod_base = OTHER; note = 2' Fluoro-uridine
  modified_base 15: mod_base = OTHER; note = 2'O-methyl-uridine
  modified_base 16: mod_base = OTHER; note = 2' Fluoro-uridine
  modified_base 17: mod_base = OTHER; note = 2'O-methyl-uridine
  modified_base 18: mod_base = OTHER; note = 2'O-methyl-uridine
  modified_base 19: mod_base = OTHER; note = 2'O-methyl-guanosine
  modified_base 20: mod_base = OTHER; note = 2'O-methyl-cytidine
  modified_base 21: mod_base = OTHER; note = 2'O-methyl-cytidine
  modified_base 22: mod_base = OTHER; note = 2'O-methyl-adenosine
  modified_base 23: mod_base = OTHER; note = 2'O-methyl-uridine
  modified_base 1..2: mod_base = OTHER; note = phosphorothioate linkage
  modified_base 2..3: mod_base = OTHER; note = phosphorothioate linkage
  modified_base 21..22: mod_base = OTHER; note = phosphorothioate linkage
  modified_base 22..23: mod_base = OTHER; note = phosphorothioate linkage
  source 1..23: mol_type = other RNA
tgtttgtcatgcttttttgccat

SEQ ID NO: 179 - RNA, 23 nt, synthetic construct
  misc_feature 1..23: note = Description of origin: HCII siRNA antisense strands
  misc_feature 1..23: note = Description of source:Antisense strand ID:
  modified_base 1: mod_base = OTHER; note = 2'O-methyl-adenosine
  modified_base 2: mod_base = OTHER; note = 2' Fluoro-uridine
  modified_base 3: mod_base = OTHER; note = 2'O-methyl-uridine
  modified_base 4: mod_base = OTHER; note = 2' Fluoro-uridine
  modified_base 5: mod_base = OTHER; note = 2'O-methyl-cytidine
  modified_base 6: mod_base = OTHER; note = 2' Fluoro-cytidine
  modified_base 7: mod_base = OTHER; note = 2'O-methyl-adenosine
  modified_base 8: mod_base = OTHER; note = 2' Fluoro-cytidine
  modified_base 9: mod_base = OTHER; note = 2' Fluoro-uridine
  modified_base 10: mod_base = OTHER; note = 2'O-methyl-guanosine
  modified_base 11: mod_base = OTHER; note = 2'O-methyl-guanosine
  modified_base 12: mod_base = OTHER; note = 2'O-methyl-guanosine
  modified_base 13: mod_base = OTHER; note = 2'O-methyl-adenosine
  modified_base 14: mod_base = OTHER; note = 2'Fluoro-adenosine
  modified_base 15: mod_base = OTHER; note = 2'O-methyl-uridine
  modified_base 16: mod_base = OTHER; note = 2' Fluoro-uridine
  modified_base 17: mod_base = OTHER; note = 2'O-methyl-uridine
  modified_base 18: mod_base = OTHER; note = 2'O-methyl-adenosine
  modified_base 19: mod_base = OTHER; note = 2'O-methyl-uridine
  modified_base 20: mod_base = OTHER; note = 2'O-methyl-uridine
  modified_base 21: mod_base = OTHER; note = 2'O-methyl-cytidine
  modified_base 22: mod_base = OTHER; note = 2'O-methyl-adenosine
  modified_base 23: mod_base = OTHER; note = 2'O-methyl-cytidine
  modified_base 1..2: mod_base = OTHER; note = phosphorothioate linkage
  modified_base 2..3: mod_base = OTHER; note = phosphorothioate linkage
  modified_base 21..22: mod_base = OTHER; note = phosphorothioate linkage
  modified_base 22..23: mod_base = OTHER; note = phosphorothioate linkage
  source 1..23: mol_type = other RNA
atttccactgggaatttattcac

SEQ ID NO: 180 - RNA, 23 nt, synthetic construct
  misc_feature 1..23: note = Description of origin: HCII siRNA antisense strands
  misc_feature 1..23: note = Description of source:Antisense strand ID:
  modified_base 1: mod_base = OTHER; note = 2'O-methyl-adenosine
  modified_base 2: mod_base = OTHER; note = 2' Fluoro-cytidine
  modified_base 3: mod_base = OTHER; note = 2'O-methyl-adenosine
  modified_base 4: mod_base = OTHER; note = 2'Fluoro-adenosine
  modified_base 5: mod_base = OTHER; note = 2'O-methyl-uridine
  modified_base 6: mod_base = OTHER; note = 2' Fluoro-uridine
  modified_base 7: mod_base = OTHER; note = 2'O-methyl-adenosine
  modified_base 8: mod_base = OTHER; note = 2' Fluoro-guanosine
  modified_base 9: mod_base = OTHER; note = 2' Fluoro-cytidine
  modified_base 10: mod_base = OTHER; note = 2'O-methyl-adenosine
  modified_base 11: mod_base = OTHER; note = 2'O-methyl-uridine
  modified_base 12: mod_base = OTHER; note = 2'O-methyl-guanosine
  modified_base 13: mod_base = OTHER; note = 2'O-methyl-cytidine
  modified_base 14: mod_base = OTHER; note = 2' Fluoro-uridine
  modified_base 15: mod_base = OTHER; note = 2'O-methyl-guanosine
  modified_base 16: mod_base = OTHER; note = 2'Fluoro-adenosine
  modified_base 17: mod_base = OTHER; note = 2'O-methyl-uridine
  modified_base 18: mod_base = OTHER; note = 2'O-methyl-guanosine
  modified_base 19: mod_base = OTHER; note = 2'O-methyl-cytidine
  modified_base 20: mod_base = OTHER; note = 2'O-methyl-cytidine
  modified_base 21: mod_base = OTHER; note = 2'O-methyl-cytidine
  modified_base 22: mod_base = OTHER; note = 2'O-methyl-cytidine
  modified_base 23: mod_base = OTHER; note = 2'O-methyl-cytidine
  modified_base 1..2: mod_base = OTHER; note = phosphorothioate linkage
  modified_base 2..3: mod_base = OTHER; note = phosphorothioate linkage
  modified_base 21..22: mod_base = OTHER; note = phosphorothioate linkage
  modified_base 22..23: mod_base = OTHER; note = phosphorothioate linkage
  source 1..23: mol_type = other RNA
acaattagcatgctgatgccccc

SEQ ID NO: 181 - RNA, 23 nt, synthetic construct
  misc_feature 1..23: note = Description of origin: HCII siRNA antisense strands
  misc_feature 1..23: note = Description of source:Antisense strand ID:
  modified_base 1: mod_base = OTHER; note = 2'O-methyl-guanosine
  modified_base 2: mod_base = OTHER; note = 2' Fluoro-uridine
  modified_base 3: mod_base = OTHER; note = 2'O-methyl-uridine
  modified_base 4: mod_base = OTHER; note = 2' Fluoro-cytidine
  modified_base 5: mod_base = OTHER; note = 2'O-methyl-uridine
  modified_base 6: mod_base = OTHER; note = 2' Fluoro-guanosine
  modified_base 7: mod_base = OTHER; note = 2'O-methyl-uridine
  modified_base 8: mod_base = OTHER; note = 2' Fluoro-uridine
  modified_base 9: mod_base = OTHER; note = 2' Fluoro-uridine
  modified_base 10: mod_base = OTHER; note = 2'O-methyl-guanosine
  modified_base 11: mod_base = OTHER; note = 2'O-methyl-uridine
  modified_base 12: mod_base = OTHER; note = 2'O-methyl-cytidine
  modified_base 13: mod_base = OTHER; note = 2'O-methyl-adenosine
  modified_base 14: mod_base = OTHER; note = 2' Fluoro-uridine
  modified_base 15: mod_base = OTHER; note = 2'O-methyl-guanosine
  modified_base 16: mod_base = OTHER; note = 2' Fluoro-cytidine
  modified_base 17: mod_base = OTHER; note = 2'O-methyl-uridine
  modified_base 18: mod_base = OTHER; note = 2'O-methyl-uridine
  modified_base 19: mod_base = OTHER; note = 2'O-methyl-uridine
  modified_base 20: mod_base = OTHER; note = 2'O-methyl-uridine
  modified_base 21: mod_base = OTHER; note = 2'O-methyl-uridine
  modified_base 22: mod_base = OTHER; note = 2'O-methyl-uridine
  modified_base 23: mod_base = OTHER; note = 2'O-methyl-guanosine
  modified_base 1..2: mod_base = OTHER; note = phosphorothioate linkage
  modified_base 2..3: mod_base = OTHER; note = phosphorothioate linkage
  modified_base 21..22: mod_base = OTHER; note = phosphorothioate linkage
  modified_base 22..23: mod_base = OTHER; note = phosphorothioate linkage
  source 1..23: mol_type = other RNA
gttctgtttgtcatgcttttttg

SEQ ID NO: 182 - RNA, 23 nt, synthetic construct
  misc_feature 1..23: note = Description of origin: HCII siRNA antisense strands
  misc_feature 1..23: note = Description of source:Antisense strand ID:
  modified_base 1: mod_base = OTHER; note = 2'O-methyl-guanosine
  modified_base 2: mod_base = OTHER; note = 2' Fluoro-guanosine
  modified_base 3: mod_base = OTHER; note = 2'O-methyl-cytidine
  modified_base 4: mod_base = OTHER; note = 2' Fluoro-cytidine
  modified_base 5: mod_base = OTHER; note = 2'O-methyl-uridine
  modified_base 6: mod_base = OTHER; note = 2' Fluoro-cytidine
  modified_base 7: mod_base = OTHER; note = 2'O-methyl-adenosine
  modified_base 8: mod_base = OTHER; note = 2' Fluoro-guanosine
  modified_base 9: mod_base = OTHER; note = 2' Fluoro-cytidine
  modified_base 10: mod_base = OTHER; note = 2'O-methyl-adenosine
  modified_base 11: mod_base = OTHER; note = 2'O-methyl-adenosine
  modified_base 12: mod_base = OTHER; note = 2'O-methyl-adenosine
  modified_base 13: mod_base = OTHER; note = 2'O-methyl-guanosine
  modified_base 14: mod_base = OTHER; note = 2' Fluoro-uridine
  modified_base 15: mod_base = OTHER; note = 2'O-methyl-adenosine
  modified_base 16: mod_base = OTHER; note = 2'Fluoro-adenosine
  modified_base 17: mod_base = OTHER; note = 2'O-methyl-uridine
  modified_base 18: mod_base = OTHER; note = 2'O-methyl-adenosine
  modified_base 19: mod_base = OTHER; note = 2'O-methyl-cytidine
  modified_base 20: mod_base = OTHER; note = 2'O-methyl-uridine
  modified_base 21: mod_base = OTHER; note = 2'O-methyl-cytidine
  modified_base 22: mod_base = OTHER; note = 2'O-methyl-uridine
  modified_base 23: mod_base = OTHER; note = 2'O-methyl-cytidine
  modified_base 1..2: mod_base = OTHER; note = phosphorothioate linkage
  modified_base 2..3: mod_base = OTHER; note = phosphorothioate linkage
  modified_base 21..22: mod_base = OTHER; note = phosphorothioate linkage
  modified_base 22..23: mod_base = OTHER; note = phosphorothioate linkage
  source 1..23: mol_type = other RNA
ggcctcagcaaagtaatactctc

SEQ ID NO: 183 - RNA, 23 nt, synthetic construct
  misc_feature 1..23: note = Description of origin: HCII siRNA antisense strands
  misc_feature 1..23: note = Description of source:Antisense strand ID:
  modified_base 1: mod_base = OTHER; note = 2'O-methyl-uridine
  modified_base 2: mod_base = OTHER; note = 2' Fluoro-uridine
  modified_base 3: mod_base = OTHER; note = 2'O-methyl-uridine
  modified_base 4: mod_base = OTHER; note = 2' Fluoro-cytidine
  modified_base 5: mod_base = OTHER; note = 2'O-methyl-cytidine
  modified_base 6: mod_base = OTHER; note = 2'Fluoro-adenosine
  modified_base 7: mod_base = OTHER; note = 2'O-methyl-cytidine
  modified_base 8: mod_base = OTHER; note = 2'O-methyl-uridine
  modified_base 9: mod_base = OTHER; note = 2'O-methyl-guanosine
  modified_base 10: mod_base = OTHER; note = 2'O-methyl-guanosine
  modified_base 11: mod_base = OTHER; note = 2'O-methyl-guanosine
  modified_base 12: mod_base = OTHER; note = 2'O-methyl-adenosine
  modified_base 13: mod_base = OTHER; note = 2'O-methyl-adenosine
  modified_base 14: mod_base = OTHER; note = 2' Fluoro-uridine
  modified_base 15: mod_base = OTHER; note = 2'O-methyl-uridine
  modified_base 16: mod_base = OTHER; note = 2' Fluoro-uridine
  modified_base 17: mod_base = OTHER; note = 2'O-methyl-adenosine
  modified_base 18: mod_base = OTHER; note = 2'O-methyl-uridine
  modified_base 19: mod_base = OTHER; note = 2'O-methyl-uridine
  modified_base 20: mod_base = OTHER; note = 2'O-methyl-cytidine
  modified_base 21: mod_base = OTHER; note = 2'O-methyl-adenosine
  modified_base 22: mod_base = OTHER; note = 2'O-methyl-cytidine
  modified_base 23: mod_base = OTHER; note = 2'O-methyl-cytidine
  modified_base 1..2: mod_base = OTHER; note = phosphorothioate linkage
  modified_base 2..3: mod_base = OTHER; note = phosphorothioate linkage
  modified_base 21..22: mod_base = OTHER; note = phosphorothioate linkage
  modified_base 22..23: mod_base = OTHER; note = phosphorothioate linkage
  source 1..23: mol_type = other RNA
tttccactgggaatttattcacc

SEQ ID NO: 184 - RNA, 23 nt, synthetic construct
  misc_feature 1..23: note = Description of origin: HCII siRNA antisense strands
  misc_feature 1..23: note = Description of source:Antisense strand ID:
  modified_base 1: mod_base = OTHER; note = 2'O-methyl-guanosine
  modified_base 2: mod_base = OTHER; note = 2'Fluoro-adenosine
  modified_base 3: mod_base = OTHER; note = 2'O-methyl-uridine
  modified_base 4: mod_base = OTHER; note = 2' Fluoro-cytidine
  modified_base 5: mod_base = OTHER; note = 2'O-methyl-cytidine
  modified_base 6: mod_base = OTHER; note = 2' Fluoro-uridine
  modified_base 7: mod_base = OTHER; note = 2'O-methyl-uridine
  modified_base 8: mod_base = OTHER; note = 2'O-methyl-uridine
  modified_base 9: mod_base = OTHER; note = 2'O-methyl-guanosine
  modified_base 10: mod_base = OTHER; note = 2'O-methyl-adenosine
  modified_base 11: mod_base = OTHER; note = 2'O-methyl-adenosine
  modified_base 12: mod_base = OTHER; note = 2'O-methyl-guanosine
  modified_base 13: mod_base = OTHER; note = 2'O-methyl-uridine
  modified_base 14: mod_base = OTHER; note = 2'Fluoro-adenosine
  modified_base 15: mod_base = OTHER; note = 2'O-methyl-guanosine
  modified_base 16: mod_base = OTHER; note = 2'Fluoro-adenosine
  modified_base 17: mod_base = OTHER; note = 2'O-methyl-uridine
  modified_base 18: mod_base = OTHER; note = 2'O-methyl-guanosine
  modified_base 19: mod_base = OTHER; note = 2'O-methyl-cytidine
  modified_base 20: mod_base = OTHER; note = 2'O-methyl-adenosine
  modified_base 21: mod_base = OTHER; note = 2'O-methyl-guanosine
  modified_base 22: mod_base = OTHER; note = 2'O-methyl-uridine
  modified_base 23: mod_base = OTHER; note = 2'O-methyl-uridine
  modified_base 1..2: mod_base = OTHER; note = phosphorothioate linkage
  modified_base 2..3: mod_base = OTHER; note = phosphorothioate linkage
  modified_base 21..22: mod_base = OTHER; note = phosphorothioate linkage
  modified_base 22..23: mod_base = OTHER; note = phosphorothioate linkage
  source 1..23: mol_type = other RNA
gatcctttgaagtagatgcagtt

SEQ ID NO: 185 - RNA, 23 nt, synthetic construct
  misc_feature 1..23: note = Description of origin: HCII siRNA antisense strands
  misc_feature 1..23: note = Description of source:Antisense strand ID:
  modified_base 1: mod_base = OTHER; note = 2'O-methyl-adenosine
  modified_base 2: mod_base = OTHER; note = 2' Fluoro-uridine
  modified_base 3: mod_base = OTHER; note = 2'O-methyl-cytidine
  modified_base 4: mod_base = OTHER; note = 2' Fluoro-cytidine
  modified_base 5: mod_base = OTHER; note = 2'O-methyl-uridine
  modified_base 6: mod_base = OTHER; note = 2' Fluoro-uridine
  modified_base 7: mod_base = OTHER; note = 2'O-methyl-uridine
  modified_base 8: mod_base = OTHER; note = 2'O-methyl-guanosine
  modified_base 9: mod_base = OTHER; note = 2'O-methyl-adenosine
  modified_base 10: mod_base = OTHER; note = 2'O-methyl-adenosine
  modified_base 11: mod_base = OTHER; note = 2'O-methyl-guanosine
  modified_base 12: mod_base = OTHER; note = 2'O-methyl-uridine
  modified_base 13: mod_base = OTHER; note = 2'O-methyl-adenosine
  modified_base 14: mod_base = OTHER; note = 2' Fluoro-guanosine
  modified_base 15: mod_base = OTHER; note = 2'O-methyl-adenosine
  modified_base 16: mod_base = OTHER; note = 2' Fluoro-uridine
  modified_base 17: mod_base = OTHER; note = 2'O-methyl-guanosine
  modified_base 18: mod_base = OTHER; note = 2'O-methyl-cytidine
  modified_base 19: mod_base = OTHER; note = 2'O-methyl-adenosine
  modified_base 20: mod_base = OTHER; note = 2'O-methyl-guanosine
  modified_base 21: mod_base = OTHER; note = 2'O-methyl-uridine
  modified_base 22: mod_base = OTHER; note = 2'O-methyl-uridine
  modified_base 23: mod_base = OTHER; note = 2'O-methyl-guanosine
  modified_base 1..2: mod_base = OTHER; note = phosphorothioate linkage
  modified_base 2..3: mod_base = OTHER; note = phosphorothioate linkage
  modified_base 21..22: mod_base = OTHER; note = phosphorothioate linkage
  modified_base 22..23: mod_base = OTHER; note = phosphorothioate linkage
  source 1..23: mol_type = other RNA
atcctttgaagtagatgcagttg

SEQ ID NO: 186 - RNA, 23 nt, synthetic construct
  misc_feature 1..23: note = Description of origin: HCII siRNA antisense strands
  misc_feature 1..23: note = Description of source:Antisense strand ID:
  modified_base 1: mod_base = OTHER; note = 2'O-methyl-adenosine
  modified_base 2: mod_base = OTHER; note = 2' Fluoro-cytidine
  modified_base 3: mod_base = OTHER; note = 2'O-methyl-uridine
  modified_base 4: mod_base = OTHER; note = 2' Fluoro-uridine
  modified_base 5: mod_base = OTHER; note = 2'O-methyl-guanosine
  modified_base 6: mod_base = OTHER; note = 2' Fluoro-uridine
  modified_base 7: mod_base = OTHER; note = 2'O-methyl-uridine
  modified_base 8: mod_base = OTHER; note = 2'O-methyl-cytidine
  modified_base 9: mod_base = OTHER; note = 2'O-methyl-adenosine
  modified_base 10: mod_base = OTHER; note = 2'O-methyl-uridine
  modified_base 11: mod_base = OTHER; note = 2'O-methyl-guanosine
  modified_base 12: mod_base = OTHER; note = 2'O-methyl-guanosine
  modified_base 13: mod_base = OTHER; note = 2'O-methyl-guanosine
  modified_base 14: mod_base = OTHER; note = 2' Fluoro-uridine
  modified_base 15: mod_base = OTHER; note = 2'O-methyl-cytidine
  modified_base 16: mod_base = OTHER; note = 2' Fluoro-uridine
  modified_base 17: mod_base = OTHER; note = 2'O-methyl-cytidine
  modified_base 18: mod_base = OTHER; note = 2'O-methyl-uridine
  modified_base 19: mod_base = OTHER; note = 2'O-methyl-cytidine
  modified_base 20: mod_base = OTHER; note = 2'O-methyl-cytidine
  modified_base 21: mod_base = OTHER; note = 2'O-methyl-cytidine
  modified_base 22: mod_base = OTHER; note = 2'O-methyl-uridine
  modified_base 23: mod_base = OTHER; note = 2'O-methyl-uridine
  modified_base 1..2: mod_base = OTHER; note = phosphorothioate linkage
  modified_base 2..3: mod_base = OTHER; note = phosphorothioate linkage
  modified_base 21..22: mod_base = OTHER; note = phosphorothioate linkage
  modified_base 22..23: mod_base = OTHER; note = phosphorothioate linkage
  source 1..23: mol_type = other RNA
acttgttcatgggtctctccctt

SEQ ID NO: 187 - RNA, 23 nt, synthetic construct
  misc_feature 1..23: note = Description of origin: HCII siRNA antisense strands
  misc_feature 1..23: note = Description of source:Antisense strand ID:
  modified_base 1: mod_base = OTHER; note = 2'O-methyl-uridine
  modified_base 2: mod_base = OTHER; note = 2' Fluoro-cytidine
  modified_base 3: mod_base = OTHER; note = 2'O-methyl-cytidine
  modified_base 4: mod_base = OTHER; note = 2'Fluoro-adenosine
  modified_base 5: mod_base = OTHER; note = 2'O-methyl-cytidine
  modified_base 6: mod_base = OTHER; note = 2' Fluoro-uridine
  modified_base 7: mod_base = OTHER; note = 2'O-methyl-guanosine
  modified_base 8: mod_base = OTHER; note = 2'O-methyl-guanosine
  modified_base 9: mod_base = OTHER; note = 2'O-methyl-guanosine
  modified_base 10: mod_base = OTHER; note = 2'O-methyl-adenosine
  modified_base 11: mod_base = OTHER; note = 2'O-methyl-adenosine
  modified_base 12: mod_base = OTHER; note = 2'O-methyl-uridine
  modified_base 13: mod_base = OTHER; note = 2'O-methyl-uridine
  modified_base 14: mod_base = OTHER; note = 2' Fluoro-uridine
  modified_base 15: mod_base = OTHER; note = 2'O-methyl-adenosine
  modified_base 16: mod_base = OTHER; note = 2' Fluoro-uridine
  modified_base 17: mod_base = OTHER; note = 2'O-methyl-uridine
  modified_base 18: mod_base = OTHER; note = 2'O-methyl-cytidine
  modified_base 19: mod_base = OTHER; note = 2'O-methyl-adenosine
  modified_base 20: mod_base = OTHER; note = 2'O-methyl-cytidine
  modified_base 21: mod_base = OTHER; note = 2'O-methyl-cytidine
  modified_base 22: mod_base = OTHER; note = 2'O-methyl-cytidine
  modified_base 23: mod_base = OTHER; note = 2'O-methyl-adenosine
  modified_base 1..2: mod_base = OTHER; note = phosphorothioate linkage
  modified_base 2..3: mod_base = OTHER; note = phosphorothioate linkage
  modified_base 21..22: mod_base = OTHER; note = phosphorothioate linkage
  modified_base 22..23: mod_base = OTHER; note = phosphorothioate linkage
  source 1..23: mol_type = other RNA
tccactgggaatttattcaccca

SEQ ID NO: 188 - RNA, 23 nt, synthetic construct
  misc_feature 1..23: note = Description of origin: HCII siRNA antisense strands
  misc_feature 1..23: note = Description of source:Antisense strand ID:
  modified_base 1: mod_base = OTHER; note = 2'O-methyl-uridine
  modified_base 2: mod_base = OTHER; note = 2' Fluoro-guanosine
  modified_base 3: mod_base = OTHER; note = 2'O-methyl-uridine
  modified_base 4: mod_base = OTHER; note = 2'Fluoro-adenosine
  modified_base 5: mod_base = OTHER; note = 2'O-methyl-cytidine
  modified_base 6: mod_base = OTHER; note = 2' Fluoro-cytidine
  modified_base 7: mod_base = OTHER; note = 2'O-methyl-cytidine
  modified_base 8: mod_base = OTHER; note = 2'O-methyl-adenosine
  modified_base 9: mod_base = OTHER; note = 2'O-methyl-adenosine
  modified_base 10: mod_base = OTHER; note = 2'O-methyl-adenosine
  modified_base 11: mod_base = OTHER; note = 2'O-methyl-adenosine
  modified_base 12: mod_base = OTHER; note = 2'O-methyl-uridine
  modified_base 13: mod_base = OTHER; note = 2'O-methyl-uridine
  modified_base 14: mod_base = OTHER; note = 2' Fluoro-cytidine
  modified_base 15: mod_base = OTHER; note = 2'O-methyl-cytidine
  modified_base 16: mod_base = OTHER; note = 2' Fluoro-uridine
  modified_base 17: mod_base = OTHER; note = 2'O-methyl-cytidine
  modified_base 18: mod_base = OTHER; note = 2'O-methyl-cytidine
  modified_base 19: mod_base = OTHER; note = 2'O-methyl-uridine
  modified_base 20: mod_base = OTHER; note = 2'O-methyl-guanosine
  modified_base 21: mod_base = OTHER; note = 2'O-methyl-adenosine
  modified_base 22: mod_base = OTHER; note = 2'O-methyl-adenosine
  modified_base 23: mod_base = OTHER; note = 2'O-methyl-guanosine
  modified_base 1..2: mod_base = OTHER; note = phosphorothioate linkage
  modified_base 2..3: mod_base = OTHER; note = phosphorothioate linkage
  modified_base 21..22: mod_base = OTHER; note = phosphorothioate linkage
  modified_base 22..23: mod_base = OTHER; note = phosphorothioate linkage
  source 1..23: mol_type = other RNA
tgtacccaaaattcctcctgaag

SEQ ID NO: 189 - RNA, 23 nt, synthetic construct
  misc_feature 1..23: note = Description of origin: HCII siRNA antisense strands
  misc_feature 1..23: note = Description of source:Antisense strand ID:
  modified_base 1: mod_base = OTHER; note = 2'O-methyl-uridine
  modified_base 2: mod_base = OTHER; note = 2' Fluoro-uridine
  modified_base 3: mod_base = OTHER; note = 2'O-methyl-cytidine
  modified_base 4: mod_base = OTHER; note = 2' Fluoro-cytidine
  modified_base 5: mod_base = OTHER; note = 2'O-methyl-cytidine
  modified_base 6: mod_base = OTHER; note = 2'Fluoro-adenosine
  modified_base 7: mod_base = OTHER; note = 2'O-methyl-uridine
  modified_base 8: mod_base = OTHER; note = 2'O-methyl-guanosine
  modified_base 9: mod_base = OTHER; note = 2'O-methyl-adenosine
  modified_base 10: mod_base = OTHER; note = 2'O-methyl-adenosine
  modified_base 11: mod_base = OTHER; note = 2'O-methyl-guanosine
  modified_base 12: mod_base = OTHER; note = 2'O-methyl-adenosine
  modified_base 13: mod_base = OTHER; note = 2'O-methyl-guanosine
  modified_base 14: mod_base = OTHER; note = 2' Fluoro-cytidine
  modified_base 15: mod_base = OTHER; note = 2'O-methyl-adenosine
  modified_base 16: mod_base = OTHER; note = 2' Fluoro-guanosine
  modified_base 17: mod_base = OTHER; note = 2'O-methyl-guanosine
  modified_base 18: mod_base = OTHER; note = 2'O-methyl-cytidine
  modified_base 19: mod_base = OTHER; note = 2'O-methyl-adenosine
  modified_base 20: mod_base = OTHER; note = 2'O-methyl-guanosine
  modified_base 21: mod_base = OTHER; note = 2'O-methyl-cytidine
  modified_base 22: mod_base = OTHER; note = 2'O-methyl-uridine
  modified_base 23: mod_base = OTHER; note = 2'O-methyl-guanosine
  modified_base 1..2: mod_base = OTHER; note = phosphorothioate linkage
  modified_base 2..3: mod_base = OTHER; note = phosphorothioate linkage
  modified_base 21..22: mod_base = OTHER; note = phosphorothioate linkage
  modified_base 22..23: mod_base = OTHER; note = phosphorothioate linkage
  source 1..23: mol_type = other RNA
ttcccatgaagagcaggcagctg

SEQ ID NO: 190 - RNA, 23 nt, synthetic construct
  misc_feature 1..23: note = Description of origin: HCII siRNA antisense strands
  misc_feature 1..23: note = Description of source:Antisense strand ID:
  modified_base 1: mod_base = OTHER; note = 2'O-methyl-uridine
  modified_base 2: mod_base = OTHER; note = 2' Fluoro-cytidine
  modified_base 3: mod_base = OTHER; note = 2'O-methyl-uridine
  modified_base 4: mod_base = OTHER; note = 2' Fluoro-uridine
  modified_base 5: mod_base = OTHER; note = 2'O-methyl-uridine
  modified_base 6: mod_base = OTHER; note = 2' Fluoro-uridine
  modified_base 7: mod_base = OTHER; note = 2'O-methyl-adenosine
  modified_base 8: mod_base = OTHER; note = 2'O-methyl-uridine
  modified_base 9: mod_base = OTHER; note = 2'O-methyl-guanosine
  modified_base 10: mod_base = OTHER; note = 2'O-methyl-adenosine
  modified_base 11: mod_base = OTHER; note = 2'O-methyl-guanosine
  modified_base 12: mod_base = OTHER; note = 2'O-methyl-guanosine
  modified_base 13: mod_base = OTHER; note = 2'O-methyl-cytidine
  modified_base 14: mod_base = OTHER; note = 2' Fluoro-cytidine
  modified_base 15: mod_base = OTHER; note = 2'O-methyl-cytidine
  modified_base 16: mod_base = OTHER; note = 2' Fluoro-uridine
  modified_base 17: mod_base = OTHER; note = 2'O-methyl-uridine
  modified_base 18: mod_base = OTHER; note = 2'O-methyl-guanosine
  modified_base 19: mod_base = OTHER; note = 2'O-methyl-guanosine
  modified_base 20: mod_base = OTHER; note = 2'O-methyl-uridine
  modified_base 21: mod_base = OTHER; note = 2'O-methyl-guanosine
  modified_base 22: mod_base = OTHER; note = 2'O-methyl-adenosine
  modified_base 23: mod_base = OTHER; note = 2'O-methyl-guanosine
  modified_base 1..2: mod_base = OTHER; note = phosphorothioate linkage
  modified_base 2..3: mod_base = OTHER; note = phosphorothioate linkage
  modified_base 21..22: mod_base = OTHER; note = phosphorothioate linkage
  modified_base 22..23: mod_base = OTHER; note = phosphorothioate linkage
  source 1..23: mol_type = other RNA
tcttttatgaggcccttggtgag

SEQ ID NO: 191 - RNA, 23 nt, synthetic construct
  misc_feature 1..23: note = Description of origin: HCII siRNA antisense strands
  misc_feature 1..23: note = Description of source:Antisense strand ID:
  modified_base 1: mod_base = OTHER; note = 2'O-methyl-adenosine
  modified_base 2: mod_base = OTHER; note = 2'Fluoro-adenosine
  modified_base 3: mod_base = OTHER; note = 2'O-methyl-cytidine
  modified_base 4: mod_base = OTHER; note = 2' Fluoro-uridine
  modified_base 5: mod_base = OTHER; note = 2'O-methyl-guanosine
  modified_base 6: mod_base = OTHER; note = 2' Fluoro-cytidine
  modified_base 7: mod_base = OTHER; note = 2'O-methyl-uridine
  modified_base 8: mod_base = OTHER; note = 2'O-methyl-uridine
  modified_base 9: mod_base = OTHER; note = 2'O-methyl-cytidine
  modified_base 10: mod_base = OTHER; note = 2'O-methyl-uridine
  modified_base 11: mod_base = OTHER; note = 2'O-methyl-guanosine
  modified_base 12: mod_base = OTHER; note = 2'O-methyl-guanosine
  modified_base 13: mod_base = OTHER; note = 2'O-methyl-adenosine
  modified_base 14: mod_base = OTHER; note = 2' Fluoro-uridine
  modified_base 15: mod_base = OTHER; note = 2'O-methyl-adenosine
  modified_base 16: mod_base = OTHER; note = 2' Fluoro-uridine
  modified_base 17: mod_base = OTHER; note = 2'O-methyl-adenosine
  modified_base 18: mod_base = OTHER; note = 2'O-methyl-adenosine
  modified_base 19: mod_base = OTHER; note = 2'O-methyl-adenosine
  modified_base 20: mod_base = OTHER; note = 2'O-methyl-guanosine
  modified_base 21: mod_base = OTHER; note = 2'O-methyl-guanosine
  modified_base 22: mod_base = OTHER; note = 2'O-methyl-uridine
  modified_base 23: mod_base = OTHER; note = 2'O-methyl-cytidine
  modified_base 1..2: mod_base = OTHER; note = phosphorothioate linkage
  modified_base 2..3: mod_base = OTHER; note = phosphorothioate linkage
  modified_base 21..22: mod_base = OTHER; note = phosphorothioate linkage
  modified_base 22..23: mod_base = OTHER; note = phosphorothioate linkage
  source 1..23: mol_type = other RNA
aactgcttctggatataaaggtc

SEQ ID NO: 192 - RNA, 23 nt, synthetic construct
  misc_feature 1..23: note = Description of origin: HCII siRNA antisense strands
  misc_feature 1..23: note = Description of source:Antisense strand ID:
  modified_base 1: mod_base = OTHER; note = 2'O-methyl-cytidine
  modified_base 2: mod_base = OTHER; note = 2' Fluoro-cytidine
  modified_base 3: mod_base = OTHER; note = 2'O-methyl-uridine
  modified_base 4: mod_base = OTHER; note = 2' Fluoro-uridine
  modified_base 5: mod_base = OTHER; note = 2'O-methyl-uridine
  modified_base 6: mod_base = OTHER; note = 2' Fluoro-guanosine
  modified_base 7: mod_base = OTHER; note = 2'O-methyl-adenosine
  modified_base 8: mod_base = OTHER; note = 2'O-methyl-adenosine
  modified_base 9: mod_base = OTHER; note = 2'O-methyl-guanosine
  modified_base 10: mod_base = OTHER; note = 2'O-methyl-uridine
  modified_base 11: mod_base = OTHER; note = 2'O-methyl-adenosine
  modified_base 12: mod_base = OTHER; note = 2'O-methyl-guanosine
  modified_base 13: mod_base = OTHER; note = 2'O-methyl-adenosine
  modified_base 14: mod_base = OTHER; note = 2' Fluoro-uridine
  modified_base 15: mod_base = OTHER; note = 2'O-methyl-guanosine
  modified_base 16: mod_base = OTHER; note = 2' Fluoro-cytidine
  modified_base 17: mod_base = OTHER; note = 2'O-methyl-adenosine
  modified_base 18: mod_base = OTHER; note = 2'O-methyl-guanosine
  modified_base 19: mod_base = OTHER; note = 2'O-methyl-uridine
  modified_base 20: mod_base = OTHER; note = 2'O-methyl-uridine
  modified_base 21: mod_base = OTHER; note = 2'O-methyl-guanosine
  modified_base 22: mod_base = OTHER; note = 2'O-methyl-adenosine
  modified_base 23: mod_base = OTHER; note = 2'O-methyl-guanosine
  modified_base 1..2: mod_base = OTHER; note = phosphorothioate linkage
  modified_base 2..3: mod_base = OTHER; note = phosphorothioate linkage
  modified_base 21..22: mod_base = OTHER; note = phosphorothioate linkage
  modified_base 22..23: mod_base = OTHER; note = phosphorothioate linkage
  source 1..23: mol_type = other RNA
cctttgaagtagatgcagttgag

SEQ ID NO: 193 - RNA, 23 nt, synthetic construct
  misc_feature 1..23: note = Description of origin: HCII siRNA antisense strands
  misc_feature 1..23: note = Description of source:Antisense strand ID:
  modified_base 1: mod_base = OTHER; note = 2'O-methyl-uridine
  modified_base 2: mod_base = OTHER; note = 2' Fluoro-uridine
  modified_base 3: mod_base = OTHER; note = 2'O-methyl-adenosine
  modified_base 4: mod_base = OTHER; note = 2'Fluoro-adenosine
  modified_base 5: mod_base = OTHER; note = 2'O-methyl-guanosine
  modified_base 6: mod_base = OTHER; note = 2'Fluoro-adenosine
  modified_base 7: mod_base = OTHER; note = 2'O-methyl-cytidine
  modified_base 8: mod_base = OTHER; note = 2'O-methyl-guanosine
  modified_base 9: mod_base = OTHER; note = 2'O-methyl-cytidine
  modified_base 10: mod_base = OTHER; note = 2'O-methyl-uridine
  modified_base 11: mod_base = OTHER; note = 2'O-methyl-guanosine
  modified_base 12: mod_base = OTHER; note = 2'O-methyl-guanosine
  modified_base 13: mod_base = OTHER; note = 2'O-methyl-adenosine
  modified_base 14: mod_base = OTHER; note = 2' Fluoro-uridine
  modified_base 15: mod_base = OTHER; note = 2'O-methyl-cytidine
  modified_base 16: mod_base = OTHER; note = 2' Fluoro-cytidine
  modified_base 17: mod_base = OTHER; note = 2'O-methyl-guanosine
  modified_base 18: mod_base = OTHER; note = 2'O-methyl-guanosine
  modified_base 19: mod_base = OTHER; note = 2'O-methyl-cytidine
  modified_base 20: mod_base = OTHER; note = 2'O-methyl-uridine
  modified_base 21: mod_base = OTHER; note = 2'O-methyl-cytidine
  modified_base 22: mod_base = OTHER; note = 2'O-methyl-uridine
  modified_base 23: mod_base = OTHER; note = 2'O-methyl-uridine
  modified_base 1..2: mod_base = OTHER; note = phosphorothioate linkage
  modified_base 2..3: mod_base = OTHER; note = phosphorothioate linkage
  modified_base 21..22: mod_base = OTHER; note = phosphorothioate linkage
  modified_base 22..23: mod_base = OTHER; note = phosphorothioate linkage
  source 1..23: mol_type = other RNA
ttaagacgctggatccggctctt

SEQ ID NO: 194 - RNA, 23 nt, synthetic construct
  misc_feature 1..23: note = Description of origin: HCII siRNA antisense strands
  misc_feature 1..23: note = Description of source:Antisense strand ID:
  modified_base 1: mod_base = OTHER; note = 2'O-methyl-guanosine
  modified_base 2: mod_base = OTHER; note = 2'Fluoro-adenosine
  modified_base 3: mod_base = OTHER; note = 2'O-methyl-guanosine
  modified_base 4: mod_base = OTHER; note = 2' Fluoro-guanosine
  modified_base 5: mod_base = OTHER; note = 2'O-methyl-adenosine
  modified_base 6: mod_base = OTHER; note = 2' Fluoro-uridine
  modified_base 7: mod_base = OTHER; note = 2'O-methyl-guanosine
  modified_base 8: mod_base = OTHER; note = 2'O-methyl-uridine
  modified_base 9: mod_base = OTHER; note = 2'O-methyl-uridine
  modified_base 10: mod_base = OTHER; note = 2'O-methyl-adenosine
  modified_base 11: mod_base = OTHER; note = 2'O-methyl-adenosine
  modified_base 12: mod_base = OTHER; note = 2'O-methyl-guanosine
  modified_base 13: mod_base = OTHER; note = 2'O-methyl-adenosine
  modified_base 14: mod_base = OTHER; note = 2' Fluoro-cytidine
  modified_base 15: mod_base = OTHER; note = 2'O-methyl-guanosine
  modified_base 16: mod_base = OTHER; note = 2' Fluoro-cytidine
  modified_base 17: mod_base = OTHER; note = 2'O-methyl-uridine
  modified_base 18: mod_base = OTHER; note = 2'O-methyl-guanosine
  modified_base 19: mod_base = OTHER; note = 2'O-methyl-guanosine
  modified_base 20: mod_base = OTHER; note = 2'O-methyl-adenosine
  modified_base 21: mod_base = OTHER; note = 2'O-methyl-uridine
  modified_base 22: mod_base = OTHER; note = 2'O-methyl-cytidine
  modified_base 23: mod_base = OTHER; note = 2'O-methyl-cytidine
  modified_base 1..2: mod_base = OTHER; note = phosphorothioate linkage
  modified_base 2..3: mod_base = OTHER; note = phosphorothioate linkage
  modified_base 21..22: mod_base = OTHER; note = phosphorothioate linkage
  modified_base 22..23: mod_base = OTHER; note = phosphorothioate linkage
  source 1..23: mol_type = other RNA
gaggatgttaagacgctggatcc

SEQ ID NO: 195 - RNA, 23 nt, synthetic construct
  misc_feature 1..23: note = Description of origin: HCII siRNA antisense strands
  misc_feature 1..23: note = Description of source:Antisense strand ID:
  modified_base 1: mod_base = OTHER; note = 2'O-methyl-uridine
  modified_base 2: mod_base = OTHER; note = 2' Fluoro-cytidine
  modified_base 3: mod_base = OTHER; note = 2'O-methyl-uridine
  modified_base 4: mod_base = OTHER; note = 2' Fluoro-guanosine
  modified_base 5: mod_base = OTHER; note = 2'O-methyl-uridine
  modified_base 6: mod_base = OTHER; note = 2' Fluoro-uridine
  modified_base 7: mod_base = OTHER; note = 2'O-methyl-uridine
  modified_base 8: mod_base = OTHER; note = 2'O-methyl-guanosine
  modified_base 9: mod_base = OTHER; note = 2'O-methyl-uridine
  modified_base 10: mod_base = OTHER; note = 2'O-methyl-cytidine
  modified_base 11: mod_base = OTHER; note = 2'O-methyl-adenosine
  modified_base 12: mod_base = OTHER; note = 2'O-methyl-uridine
  modified_base 13: mod_base = OTHER; note = 2'O-methyl-guanosine
  modified_base 14: mod_base = OTHER; note = 2' Fluoro-cytidine
  modified_base 15: mod_base = OTHER; note = 2'O-methyl-uridine
  modified_base 16: mod_base = OTHER; note = 2' Fluoro-uridine
  modified_base 17: mod_base = OTHER; note = 2'O-methyl-uridine
  modified_base 18: mod_base = OTHER; note = 2'O-methyl-uridine
  modified_base 19: mod_base = OTHER; note = 2'O-methyl-uridine
  modified_base 20: mod_base = OTHER; note = 2'O-methyl-uridine
  modified_base 21: mod_base = OTHER; note = 2'O-methyl-guanosine
  modified_base 22: mod_base = OTHER; note = 2'O-methyl-cytidine
  modified_base 23: mod_base = OTHER; note = 2'O-methyl-cytidine
  modified_base 1..2: mod_base = OTHER; note = phosphorothioate linkage
  modified_base 2..3: mod_base = OTHER; note = phosphorothioate linkage
  modified_base 21..22: mod_base = OTHER; note = phosphorothioate linkage
  modified_base 22..23: mod_base = OTHER; note = phosphorothioate linkage
  source 1..23: mol_type = other RNA
tctgtttgtcatgcttttttgcc

SEQ ID NO: 196 - RNA, 23 nt, synthetic construct
  misc_feature 1..23: note = Description of origin: HCII siRNA antisense strands
  misc_feature 1..23: note = Description of source:Antisense strand ID:
  modified_base 1: mod_base = OTHER; note = 2'O-methyl-guanosine
  modified_base 2: mod_base = OTHER; note = 2' Fluoro-uridine
  modified_base 3: mod_base = OTHER; note = 2'O-methyl-guanosine
  modified_base 4: mod_base = OTHER; note = 2' Fluoro-uridine
  modified_base 5: mod_base = OTHER; note = 2'O-methyl-adenosine
  modified_base 6: mod_base = OTHER; note = 2' Fluoro-cytidine
  modified_base 7: mod_base = OTHER; note = 2'O-methyl-cytidine
  modified_base 8: mod_base = OTHER; note = 2'O-methyl-cytidine
  modified_base 9: mod_base = OTHER; note = 2'O-methyl-adenosine
  modified_base 10: mod_base = OTHER; note = 2'O-methyl-adenosine
  modified_base 11: mod_base = OTHER; note = 2'O-methyl-adenosine
  modified_base 12: mod_base = OTHER; note = 2'O-methyl-adenosine
  modified_base 13: mod_base = OTHER; note = 2'O-methyl-uridine
  modified_base 14: mod_base = OTHER; note = 2' Fluoro-uridine
  modified_base 15: mod_base = OTHER; note = 2'O-methyl-cytidine
  modified_base 16: mod_base = OTHER; note = 2' Fluoro-cytidine
  modified_base 17: mod_base = OTHER; note = 2'O-methyl-uridine
  modified_base 18: mod_base = OTHER; note = 2'O-methyl-cytidine
  modified_base 19: mod_base = OTHER; note = 2'O-methyl-cytidine
  modified_base 20: mod_base = OTHER; note = 2'O-methyl-uridine
  modified_base 21: mod_base = OTHER; note = 2'O-methyl-guanosine
  modified_base 22: mod_base = OTHER; note = 2'O-methyl-adenosine
  modified_base 23: mod_base = OTHER; note = 2'O-methyl-adenosine
  modified_base 1..2: mod_base = OTHER; note = phosphorothioate linkage
  modified_base 2..3: mod_base = OTHER; note = phosphorothioate linkage
  modified_base 21..22: mod_base = OTHER; note = phosphorothioate linkage
  modified_base 22..23: mod_base = OTHER; note = phosphorothioate linkage
  source 1..23: mol_type = other RNA
gtgtacccaaaattcctcctgaa

SEQ ID NO: 197 - RNA, 23 nt, synthetic construct
  misc_feature 1..23: note = Description of origin: HCII siRNA antisense strands
  misc_feature 1..23: note = Description of source:Antisense strand ID:
  modified_base 1: mod_base = OTHER; note = 2'O-methyl-uridine
  modified_base 2: mod_base = OTHER; note = 2' Fluoro-uridine
  modified_base 3: mod_base = OTHER; note = 2'O-methyl-cytidine
  modified_base 4: mod_base = OTHER; note = 2'Fluoro-adenosine
  modified_base 5: mod_base = OTHER; note = 2'O-methyl-guanosine
  modified_base 6: mod_base = OTHER; note = 2' Fluoro-cytidine
  modified_base 7: mod_base = OTHER; note = 2'O-methyl-cytidine
  modified_base 8: mod_base = OTHER; note = 2'O-methyl-guanosine
  modified_base 9: mod_base = OTHER; note = 2'O-methyl-guanosine
  modified_base 10: mod_base = OTHER; note = 2'O-methyl-adenosine
  modified_base 11: mod_base = OTHER; note = 2'O-methyl-adenosine
  modified_base 12: mod_base = OTHER; note = 2'O-methyl-guanosine
  modified_base 13: mod_base = OTHER; note = 2'O-methyl-uridine
  modified_base 14: mod_base = OTHER; note = 2' Fluoro-uridine
  modified_base 15: mod_base = OTHER; note = 2'O-methyl-guanosine
  modified_base 16: mod_base = OTHER; note = 2' Fluoro-uridine
  modified_base 17: mod_base = OTHER; note = 2'O-methyl-guanosine
  modified_base 18: mod_base = OTHER; note = 2'O-methyl-guanosine
  modified_base 19: mod_base = OTHER; note = 2'O-methyl-uridine
  modified_base 20: mod_base = OTHER; note = 2'O-methyl-uridine
  modified_base 21: mod_base = OTHER; note = 2'O-methyl-guanosine
  modified_base 22: mod_base = OTHER; note = 2'O-methyl-uridine
  modified_base 23: mod_base = OTHER; note = 2'O-methyl-guanosine
  modified_base 1..2: mod_base = OTHER; note = phosphorothioate linkage
  modified_base 2..3: mod_base = OTHER; note = phosphorothioate linkage
  modified_base 21..22: mod_base = OTHER; note = phosphorothioate linkage
  modified_base 22..23: mod_base = OTHER; note = phosphorothioate linkage
  source 1..23: mol_type = other RNA
ttcagccggaagttgtggttgtg

SEQ ID NO: 198 - RNA, 23 nt, synthetic construct
  misc_feature 1..23: note = Description of origin: HCII siRNA antisense strands
  misc_feature 1..23: note = Description of source:Antisense strand ID:
  modified_base 1: mod_base = OTHER; note = 2'O-methyl-uridine
  modified_base 2: mod_base = OTHER; note = 2' Fluoro-guanosine
  modified_base 3: mod_base = OTHER; note = 2'O-methyl-uridine
  modified_base 4: mod_base = OTHER; note = 2' Fluoro-uridine
  modified_base 5: mod_base = OTHER; note = 2'O-methyl-uridine
  modified_base 6: mod_base = OTHER; note = 2' Fluoro-guanosine
  modified_base 7: mod_base = OTHER; note = 2'O-methyl-uridine
  modified_base 8: mod_base = OTHER; note = 2'O-methyl-cytidine
  modified_base 9: mod_base = OTHER; note = 2'O-methyl-adenosine
  modified_base 10: mod_base = OTHER; note = 2'O-methyl-uridine
  modified_base 11: mod_base = OTHER; note = 2'O-methyl-guanosine
  modified_base 12: mod_base = OTHER; note = 2'O-methyl-cytidine
  modified_base 13: mod_base = OTHER; note = 2'O-methyl-uridine
  modified_base 14: mod_base = OTHER; note = 2' Fluoro-uridine
  modified_base 15: mod_base = OTHER; note = 2'O-methyl-uridine
  modified_base 16: mod_base = OTHER; note = 2' Fluoro-uridine
  modified_base 17: mod_base = OTHER; note = 2'O-methyl-uridine
  modified_base 18: mod_base = OTHER; note = 2'O-methyl-uridine
  modified_base 19: mod_base = OTHER; note = 2'O-methyl-guanosine
  modified_base 20: mod_base = OTHER; note = 2'O-methyl-cytidine
  modified_base 21: mod_base = OTHER; note = 2'O-methyl-cytidine
  modified_base 22: mod_base = OTHER; note = 2'O-methyl-adenosine
  modified_base 23: mod_base = OTHER; note = 2'O-methyl-uridine
  modified_base 1..2: mod_base = OTHER; note = phosphorothioate linkage
  modified_base 2..3: mod_base = OTHER; note = phosphorothioate linkage
  modified_base 21..22: mod_base = OTHER; note = phosphorothioate linkage
  modified_base 22..23: mod_base = OTHER; note = phosphorothioate linkage
  source 1..23: mol_type = other RNA
tgtttgtcatgcttttttgccat

SEQ ID NO: 199 - RNA, 23 nt, synthetic construct
  misc_feature 1..23: note = Description of origin: HCII siRNA antisense strands
  misc_feature 1..23: note = Description of source:Antisense strand ID:
  modified_base 1: mod_base = OTHER; note = 2'O-methyl-adenosine
  modified_base 2: mod_base = OTHER; note = 2' Fluoro-uridine
  modified_base 3: mod_base = OTHER; note = 2'O-methyl-uridine
  modified_base 4: mod_base = OTHER; note = 2' Fluoro-uridine
  modified_base 5: mod_base = OTHER; note = 2'O-methyl-cytidine
  modified_base 6: mod_base = OTHER; note = 2' Fluoro-cytidine
  modified_base 7: mod_base = OTHER; note = 2'O-methyl-adenosine
  modified_base 8: mod_base = OTHER; note = 2'O-methyl-cytidine
  modified_base 9: mod_base = OTHER; note = 2'O-methyl-uridine
  modified_base 10: mod_base = OTHER; note = 2'O-methyl-guanosine
  modified_base 11: mod_base = OTHER; note = 2'O-methyl-guanosine
  modified_base 12: mod_base = OTHER; note = 2'O-methyl-guanosine
  modified_base 13: mod_base = OTHER; note = 2'O-methyl-adenosine
  modified_base 14: mod_base = OTHER; note = 2'Fluoro-adenosine
  modified_base 15: mod_base = OTHER; note = 2'O-methyl-uridine
  modified_base 16: mod_base = OTHER; note = 2' Fluoro-uridine
  modified_base 17: mod_base = OTHER; note = 2'O-methyl-uridine
  modified_base 18: mod_base = OTHER; note = 2'O-methyl-adenosine
  modified_base 19: mod_base = OTHER; note = 2'O-methyl-uridine
  modified_base 20: mod_base = OTHER; note = 2'O-methyl-uridine
  modified_base 21: mod_base = OTHER; note = 2'O-methyl-cytidine
  modified_base 22: mod_base = OTHER; note = 2'O-methyl-adenosine
  modified_base 23: mod_base = OTHER; note = 2'O-methyl-cytidine
  modified_base 1..2: mod_base = OTHER; note = phosphorothioate linkage
  modified_base 2..3: mod_base = OTHER; note = phosphorothioate linkage
  modified_base 21..22: mod_base = OTHER; note = phosphorothioate linkage
  modified_base 22..23: mod_base = OTHER; note = phosphorothioate linkage
  source 1..23: mol_type = other RNA
atttccactgggaatttattcac

SEQ ID NO: 200 - RNA, 23 nt, synthetic construct
  misc_feature 1..23: note = Description of origin: HCII siRNA antisense strands
  misc_feature 1..23: note = Description of source:Antisense strand ID:
  modified_base 1: mod_base = OTHER; note = 2'O-methyl-adenosine
  modified_base 2: mod_base = OTHER; note = 2' Fluoro-cytidine
  modified_base 3: mod_base = OTHER; note = 2'O-methyl-adenosine
  modified_base 4: mod_base = OTHER; note = 2'Fluoro-adenosine
  modified_base 5: mod_base = OTHER; note = 2'O-methyl-uridine
  modified_base 6: mod_base = OTHER; note = 2' Fluoro-uridine
  modified_base 7: mod_base = OTHER; note = 2'O-methyl-adenosine
  modified_base 8: mod_base = OTHER; note = 2'O-methyl-guanosine
  modified_base 9: mod_base = OTHER; note = 2'O-methyl-cytidine
  modified_base 10: mod_base = OTHER; note = 2'O-methyl-adenosine
  modified_base 11: mod_base = OTHER; note = 2'O-methyl-uridine
  modified_base 12: mod_base = OTHER; note = 2'O-methyl-guanosine
  modified_base 13: mod_base = OTHER; note = 2'O-methyl-cytidine
  modified_base 14: mod_base = OTHER; note = 2' Fluoro-uridine
  modified_base 15: mod_base = OTHER; note = 2'O-methyl-guanosine
  modified_base 16: mod_base = OTHER; note = 2'Fluoro-adenosine
  modified_base 17: mod_base = OTHER; note = 2'O-methyl-uridine
  modified_base 18: mod_base = OTHER; note = 2'O-methyl-guanosine
  modified_base 19: mod_base = OTHER; note = 2'O-methyl-cytidine
  modified_base 20: mod_base = OTHER; note = 2'O-methyl-cytidine
  modified_base 21: mod_base = OTHER; note = 2'O-methyl-cytidine
  modified_base 22: mod_base = OTHER; note = 2'O-methyl-cytidine
  modified_base 23: mod_base = OTHER; note = 2'O-methyl-cytidine
  modified_base 1..2: mod_base = OTHER; note = phosphorothioate linkage
  modified_base 2..3: mod_base = OTHER; note = phosphorothioate linkage
  modified_base 21..22: mod_base = OTHER; note = phosphorothioate linkage
  modified_base 22..23: mod_base = OTHER; note = phosphorothioate linkage
  source 1..23: mol_type = other RNA
acaattagcatgctgatgccccc

SEQ ID NO: 201 - RNA, 23 nt, synthetic construct
  misc_feature 1..23: note = Description of origin: HCII siRNA antisense strands
  misc_feature 1..23: note = Description of source:Antisense strand ID:
  modified_base 1: mod_base = OTHER; note = 2'O-methyl-guanosine
  modified_base 2: mod_base = OTHER; note = 2' Fluoro-uridine
  modified_base 3: mod_base = OTHER; note = 2'O-methyl-uridine
  modified_base 4: mod_base = OTHER; note = 2' Fluoro-cytidine
  modified_base 5: mod_base = OTHER; note = 2'O-methyl-uridine
  modified_base 6: mod_base = OTHER; note = 2' Fluoro-guanosine
  modified_base 7: mod_base = OTHER; note = 2'O-methyl-uridine
  modified_base 8: mod_base = OTHER; note = 2'O-methyl-uridine
  modified_base 9: mod_base = OTHER; note = 2'O-methyl-uridine
  modified_base 10: mod_base = OTHER; note = 2'O-methyl-guanosine
  modified_base 11: mod_base = OTHER; note = 2'O-methyl-uridine
  modified_base 12: mod_base = OTHER; note = 2'O-methyl-cytidine
  modified_base 13: mod_base = OTHER; note = 2'O-methyl-adenosine
  modified_base 14: mod_base = OTHER; note = 2' Fluoro-uridine
  modified_base 15: mod_base = OTHER; note = 2'O-methyl-guanosine
  modified_base 16: mod_base = OTHER; note = 2' Fluoro-cytidine
  modified_base 17: mod_base = OTHER; note = 2'O-methyl-uridine
  modified_base 18: mod_base = OTHER; note = 2'O-methyl-uridine
  modified_base 19: mod_base = OTHER; note = 2'O-methyl-uridine
  modified_base 20: mod_base = OTHER; note = 2'O-methyl-uridine
  modified_base 21: mod_base = OTHER; note = 2'O-methyl-uridine
  modified_base 22: mod_base = OTHER; note = 2'O-methyl-uridine
  modified_base 23: mod_base = OTHER; note = 2'O-methyl-guanosine
  modified_base 1..2: mod_base = OTHER; note = phosphorothioate linkage
  modified_base 2..3: mod_base = OTHER; note = phosphorothioate linkage
  modified_base 21..22: mod_base = OTHER; note = phosphorothioate linkage
  modified_base 22..23: mod_base = OTHER; note = phosphorothioate linkage
  source 1..23: mol_type = other RNA
gttctgtttgtcatgcttttttg

SEQ ID NO: 202 - RNA, 23 nt, synthetic construct
  misc_feature 1..23: note = Description of origin: HCII siRNA antisense strands
  misc_feature 1..23: note = Description of source:Antisense strand ID:
  modified_base 1: mod_base = OTHER; note = 2'O-methyl-guanosine
  modified_base 2: mod_base = OTHER; note = 2' Fluoro-guanosine
  modified_base 3: mod_base = OTHER; note = 2'O-methyl-cytidine
  modified_base 4: mod_base = OTHER; note = 2' Fluoro-cytidine
  modified_base 5: mod_base = OTHER; note = 2'O-methyl-uridine
  modified_base 6: mod_base = OTHER; note = 2' Fluoro-cytidine
  modified_base 7: mod_base = OTHER; note = 2'O-methyl-adenosine
  modified_base 8: mod_base = OTHER; note = 2'O-methyl-guanosine
  modified_base 9: mod_base = OTHER; note = 2'O-methyl-cytidine
  modified_base 10: mod_base = OTHER; note = 2'O-methyl-adenosine
  modified_base 11: mod_base = OTHER; note = 2'O-methyl-adenosine
  modified_base 12: mod_base = OTHER; note = 2'O-methyl-adenosine
  modified_base 13: mod_base = OTHER; note = 2'O-methyl-guanosine
  modified_base 14: mod_base = OTHER; note = 2' Fluoro-uridine
  modified_base 15: mod_base = OTHER; note = 2'O-methyl-adenosine
  modified_base 16: mod_base = OTHER; note = 2'Fluoro-adenosine
  modified_base 17: mod_base = OTHER; note = 2'O-methyl-uridine
  modified_base 18: mod_base = OTHER; note = 2'O-methyl-adenosine
  modified_base 19: mod_base = OTHER; note = 2'O-methyl-cytidine
  modified_base 20: mod_base = OTHER; note = 2'O-methyl-uridine
  modified_base 21: mod_base = OTHER; note = 2'O-methyl-cytidine
  modified_base 22: mod_base = OTHER; note = 2'O-methyl-uridine
  modified_base 23: mod_base = OTHER; note = 2'O-methyl-cytidine
  modified_base 1..2: mod_base = OTHER; note = phosphorothioate linkage
  modified_base 2..3: mod_base = OTHER; note = phosphorothioate linkage
  modified_base 21..22: mod_base = OTHER; note = phosphorothioate linkage
  modified_base 22..23: mod_base = OTHER; note = phosphorothioate linkage
  source 1..23: mol_type = other RNA
ggcctcagcaaagtaatactctc

SEQ ID NO: 203 - RNA, 23 nt, synthetic construct
  misc_feature 1..23: note = Description of origin: ZPI siRNA antisense strands
  misc_feature 1..23: note = Description of source:Antisense strand ID:
  modified_base 1: mod_base = OTHER; note = 2'O-methyl-adenosine
  modified_base 2: mod_base = OTHER; note = 2'Fluoro-adenosine
  modified_base 3: mod_base = OTHER; note = 2'O-methyl-adenosine
  modified_base 4: mod_base = OTHER; note = 2' Fluoro-uridine
  modified_base 5: mod_base = OTHER; note = 2'O-methyl-cytidine
  modified_base 6: mod_base = OTHER; note = 2' Fluoro-cytidine
  modified_base 7: mod_base = OTHER; note = 2'O-methyl-uridine
  modified_base 8: mod_base = OTHER; note = 2' Fluoro-uridine
  modified_base 9: mod_base = OTHER; note = 2' Fluoro-guanosine
  modified_base 10: mod_base = OTHER; note = 2'O-methyl-uridine
  modified_base 11: mod_base = OTHER; note = 2'O-methyl-guanosine
  modified_base 12: mod_base = OTHER; note = 2'O-methyl-guanosine
  modified_base 13: mod_base = OTHER; note = 2'O-methyl-adenosine
  modified_base 14: mod_base = OTHER; note = 2' Fluoro-uridine
  modified_base 15: mod_base = OTHER; note = 2'O-methyl-guanosine
  modified_base 16: mod_base = OTHER; note = 2'Fluoro-adenosine
  modified_base 17: mod_base = OTHER; note = 2'O-methyl-adenosine
  modified_base 18: mod_base = OTHER; note = 2'O-methyl-guanosine
  modified_base 19: mod_base = OTHER; note = 2'O-methyl-guanosine
  modified_base 20: mod_base = OTHER; note = 2'O-methyl-cytidine
  modified_base 21: mod_base = OTHER; note = 2'O-methyl-adenosine
  modified_base 22: mod_base = OTHER; note = 2'O-methyl-adenosine
  modified_base 23: mod_base = OTHER; note = 2'O-methyl-adenosine
  modified_base 1..2: mod_base = OTHER; note = phosphorothioate linkage
  modified_base 2..3: mod_base = OTHER; note = phosphorothioate linkage
  modified_base 21..22: mod_base = OTHER; note = phosphorothioate linkage
  modified_base 22..23: mod_base = OTHER; note = phosphorothioate linkage
  source 1..23: mol_type = other RNA
aaatccttgtggatgaaggcaaa

SEQ ID NO: 204 - RNA, 23 nt, synthetic construct
  misc_feature 1..23: note = Description of origin: ZPI siRNA antisense strands
  misc_feature 1..23: note = Description of source:Antisense strand ID:
  modified_base 1: mod_base = OTHER; note = 2'O-methyl-guanosine
  modified_base 2: mod_base = OTHER; note = 2' Fluoro-cytidine
  modified_base 3: mod_base = OTHER; note = 2'O-methyl-cytidine
  modified_base 4: mod_base = OTHER; note = 2' Fluoro-uridine
  modified_base 5: mod_base = OTHER; note = 2'O-methyl-cytidine
  modified_base 6: mod_base = OTHER; note = 2'Fluoro-adenosine
  modified_base 7: mod_base = OTHER; note = 2'O-methyl-uridine
  modified_base 8: mod_base = OTHER; note = 2' Fluoro-guanosine
  modified_base 9: mod_base = OTHER; note = 2' Fluoro-guanosine
  modified_base 10: mod_base = OTHER; note = 2'O-methyl-adenosine
  modified_base 11: mod_base = OTHER; note = 2'O-methyl-guanosine
  modified_base 12: mod_base = OTHER; note = 2'O-methyl-adenosine
  modified_base 13: mod_base = OTHER; note = 2'O-methyl-uridine
  modified_base 14: mod_base = OTHER; note = 2' Fluoro-cytidine
  modified_base 15: mod_base = OTHER; note = 2'O-methyl-uridine
  modified_base 16: mod_base = OTHER; note = 2' Fluoro-uridine
  modified_base 17: mod_base = OTHER; note = 2'O-methyl-uridine
  modified_base 18: mod_base = OTHER; note = 2'O-methyl-cytidine
  modified_base 19: mod_base = OTHER; note = 2'O-methyl-guanosine
  modified_base 20: mod_base = OTHER; note = 2'O-methyl-cytidine
  modified_base 21: mod_base = OTHER; note = 2'O-methyl-adenosine
  modified_base 22: mod_base = OTHER; note = 2'O-methyl-guanosine
  modified_base 23: mod_base = OTHER; note = 2'O-methyl-cytidine
  modified_base 1..2: mod_base = OTHER; note = phosphorothioate linkage
  modified_base 2..3: mod_base = OTHER; note = phosphorothioate linkage
  modified_base 21..22: mod_base = OTHER; note = phosphorothioate linkage
  modified_base 22..23: mod_base = OTHER; note = phosphorothioate linkage
  source 1..23: mol_type = other RNA
gcctcatggagatctttcgcagc

SEQ ID NO: 205 - RNA, 23 nt, synthetic construct
  misc_feature 1..23: note = Description of origin: ZPI siRNA antisense strands
  misc_feature 1..23: note = Description of source:Antisense strand ID:
  modified_base 1: mod_base = OTHER; note = 2'O-methyl-uridine
  modified_base 2: mod_base = OTHER; note = 2' Fluoro-uridine
  modified_base 3: mod_base = OTHER; note = 2'O-methyl-cytidine
  modified_base 4: mod_base = OTHER; note = 2' Fluoro-uridine
  modified_base 5: mod_base = OTHER; note = 2'O-methyl-cytidine
  modified_base 6: mod_base = OTHER; note = 2' Fluoro-cytidine
  modified_base 7: mod_base = OTHER; note = 2'O-methyl-adenosine
  modified_base 8: mod_base = OTHER; note = 2' Fluoro-uridine
  modified_base 9: mod_base = OTHER; note = 2' Fluoro-guanosine
  modified_base 10: mod_base = OTHER; note = 2'O-methyl-adenosine
  modified_base 11: mod_base = OTHER; note = 2'O-methyl-guanosine
  modified_base 12: mod_base = OTHER; note = 2'O-methyl-guanosine
  modified_base 13: mod_base = OTHER; note = 2'O-methyl-adenosine
  modified_base 14: mod_base = OTHER; note = 2' Fluoro-cytidine
  modified_base 15: mod_base = OTHER; note = 2'O-methyl-cytidine
  modified_base 16: mod_base = OTHER; note = 2'Fluoro-adenosine
  modified_base 17: mod_base = OTHER; note = 2'O-methyl-cytidine
  modified_base 18: mod_base = OTHER; note = 2'O-methyl-cytidine
  modified_base 19: mod_base = OTHER; note = 2'O-methyl-adenosine
  modified_base 20: mod_base = OTHER; note = 2'O-methyl-guanosine
  modified_base 21: mod_base = OTHER; note = 2'O-methyl-cytidine
  modified_base 22: mod_base = OTHER; note = 2'O-methyl-adenosine
  modified_base 23: mod_base = OTHER; note = 2'O-methyl-uridine
  modified_base 1..2: mod_base = OTHER; note = phosphorothioate linkage
  modified_base 2..3: mod_base = OTHER; note = phosphorothioate linkage
  modified_base 21..22: mod_base = OTHER; note = phosphorothioate linkage
  modified_base 22..23: mod_base = OTHER; note = phosphorothioate linkage
  source 1..23: mol_type = other RNA
ttctccatgaggaccaccagcat

SEQ ID NO: 206 - RNA, 23 nt, synthetic construct
  misc_feature 1..23: note = Description of origin: ZPI siRNA antisense strands
  misc_feature 1..23: note = Description of source:Antisense strand ID:
  modified_base 1: mod_base = OTHER; note = 2'O-methyl-uridine
  modified_base 2: mod_base = OTHER; note = 2' Fluoro-guanosine
  modified_base 3: mod_base = OTHER; note = 2'O-methyl-cytidine
  modified_base 4: mod_base = OTHER; note = 2' Fluoro-cytidine
  modified_base 5: mod_base = OTHER; note = 2'O-methyl-uridine
  modified_base 6: mod_base = OTHER; note = 2' Fluoro-cytidine
  modified_base 7: mod_base = OTHER; note = 2'O-methyl-adenosine
  modified_base 8: mod_base = OTHER; note = 2' Fluoro-uridine
  modified_base 9: mod_base = OTHER; note = 2' Fluoro-guanosine
  modified_base 10: mod_base = OTHER; note = 2'O-methyl-guanosine
  modified_base 11: mod_base = OTHER; note = 2'O-methyl-adenosine
  modified_base 12: mod_base = OTHER; note = 2'O-methyl-guanosine
  modified_base 13: mod_base = OTHER; note = 2'O-methyl-adenosine
  modified_base 14: mod_base = OTHER; note = 2' Fluoro-uridine
  modified_base 15: mod_base = OTHER; note = 2'O-methyl-cytidine
  modified_base 16: mod_base = OTHER; note = 2' Fluoro-uridine
  modified_base 17: mod_base = OTHER; note = 2'O-methyl-uridine
  modified_base 18: mod_base = OTHER; note = 2'O-methyl-uridine
  modified_base 19: mod_base = OTHER; note = 2'O-methyl-cytidine
  modified_base 20: mod_base = OTHER; note = 2'O-methyl-guanosine
  modified_base 21: mod_base = OTHER; note = 2'O-methyl-cytidine
  modified_base 22: mod_base = OTHER; note = 2'O-methyl-adenosine
  modified_base 23: mod_base = OTHER; note = 2'O-methyl-guanosine
  modified_base 1..2: mod_base = OTHER; note = phosphorothioate linkage
  modified_base 2..3: mod_base = OTHER; note = phosphorothioate linkage
  modified_base 21..22: mod_base = OTHER; note = phosphorothioate linkage
  modified_base 22..23: mod_base = OTHER; note = phosphorothioate linkage
  source 1..23: mol_type = other RNA
tgcctcatggagatctttcgcag

SEQ ID NO: 207 - RNA, 23 nt, synthetic construct
  misc_feature 1..23: note = Description of origin: ZPI siRNA antisense strands
  misc_feature 1..23: note = Description of source:Antisense strand ID:
  modified_base 1: mod_base = OTHER; note = 2'O-methyl-adenosine
  modified_base 2: mod_base = OTHER; note = 2' Fluoro-guanosine
  modified_base 3: mod_base = OTHER; note = 2'O-methyl-cytidine
  modified_base 4: mod_base = OTHER; note = 2'Fluoro-adenosine
  modified_base 5: mod_base = OTHER; note = 2'O-methyl-guanosine
  modified_base 6: mod_base = OTHER; note = 2' Fluoro-cytidine
  modified_base 7: mod_base = OTHER; note = 2'O-methyl-uridine
  modified_base 8: mod_base = OTHER; note = 2' Fluoro-cytidine
  modified_base 9: mod_base = OTHER; note = 2'Fluoro-adenosine
  modified_base 10: mod_base = OTHER; note = 2'O-methyl-uridine
  modified_base 11: mod_base = OTHER; note = 2'O-methyl-guanosine
  modified_base 12: mod_base = OTHER; note = 2'O-methyl-cytidine
  modified_base 13: mod_base = OTHER; note = 2'O-methyl-adenosine
  modified_base 14: mod_base = OTHER; note = 2' Fluoro-uridine
  modified_base 15: mod_base = OTHER; note = 2'O-methyl-cytidine
  modified_base 16: mod_base = OTHER; note = 2' Fluoro-uridine
  modified_base 17: mod_base = OTHER; note = 2'O-methyl-cytidine
  modified_base 18: mod_base = OTHER; note = 2'O-methyl-adenosine
  modified_base 19: mod_base = OTHER; note = 2'O-methyl-uridine
  modified_base 20: mod_base = OTHER; note = 2'O-methyl-adenosine
  modified_base 21: mod_base = OTHER; note = 2'O-methyl-cytidine
  modified_base 22: mod_base = OTHER; note = 2'O-methyl-uridine
  modified_base 23: mod_base = OTHER; note = 2'O-methyl-uridine
  modified_base 1..2: mod_base = OTHER; note = phosphorothioate linkage
  modified_base 2..3: mod_base = OTHER; note = phosphorothioate linkage
  modified_base 21..22: mod_base = OTHER; note = phosphorothioate linkage
  modified_base 22..23: mod_base = OTHER; note = phosphorothioate linkage
  source 1..23: mol_type = other RNA
agcagctcatgcatctcatactt

SEQ ID NO: 208 - RNA, 23 nt, synthetic construct
  misc_feature 1..23: note = Description of origin: ZPI siRNA antisense strands
  misc_feature 1..23: note = Description of source:Antisense strand ID:
  modified_base 1: mod_base = OTHER; note = 2'O-methyl-uridine
  modified_base 2: mod_base = OTHER; note = 2' Fluoro-cytidine
  modified_base 3: mod_base = OTHER; note = 2'O-methyl-adenosine
  modified_base 4: mod_base = OTHER; note = 2' Fluoro-guanosine
  modified_base 5: mod_base = OTHER; note = 2'O-methyl-guanosine
  modified_base 6: mod_base = OTHER; note = 2'Fluoro-adenosine
  modified_base 7: mod_base = OTHER; note = 2'O-methyl-uridine
  modified_base 8: mod_base = OTHER; note = 2' Fluoro-uridine
  modified_base 9: mod_base = OTHER; note = 2'Fluoro-adenosine
  modified_base 10: mod_base = OTHER; note = 2'O-methyl-adenosine
  modified_base 11: mod_base = OTHER; note = 2'O-methyl-uridine
  modified_base 12: mod_base = OTHER; note = 2'O-methyl-cytidine
  modified_base 13: mod_base = OTHER; note = 2'O-methyl-uridine
  modified_base 14: mod_base = OTHER; note = 2' Fluoro-cytidine
  modified_base 15: mod_base = OTHER; note = 2'O-methyl-adenosine
  modified_base 16: mod_base = OTHER; note = 2' Fluoro-uridine
  modified_base 17: mod_base = OTHER; note = 2'O-methyl-cytidine
  modified_base 18: mod_base = OTHER; note = 2'O-methyl-adenosine
  modified_base 19: mod_base = OTHER; note = 2'O-methyl-adenosine
  modified_base 20: mod_base = OTHER; note = 2'O-methyl-adenosine
  modified_base 21: mod_base = OTHER; note = 2'O-methyl-cytidine
  modified_base 22: mod_base = OTHER; note = 2'O-methyl-adenosine
  modified_base 23: mod_base = OTHER; note = 2'O-methyl-guanosine
  modified_base 1..2: mod_base = OTHER; note = phosphorothioate linkage
  modified_base 2..3: mod_base = OTHER; note = phosphorothioate linkage
  modified_base 21..22: mod_base = OTHER; note = phosphorothioate linkage
  modified_base 22..23: mod_base = OTHER; note = phosphorothioate linkage
  source 1..23: mol_type = other RNA
tcaggattaatctcatcaaacag

SEQ ID NO: 209 - RNA, 23 nt, synthetic construct
  misc_feature 1..23: note = Description of origin: ZPI siRNA antisense strands
  misc_feature 1..23: note = Description of source:Antisense strand ID:
  modified_base 1: mod_base = OTHER; note = 2'O-methyl-uridine
  modified_base 2: mod_base = OTHER; note = 2' Fluoro-uridine
  modified_base 3: mod_base = OTHER; note = 2'O-methyl-guanosine
  modified_base 4: mod_base = OTHER; note = 2' Fluoro-guanosine
  modified_base 5: mod_base = OTHER; note = 2'O-methyl-uridine
  modified_base 6: mod_base = OTHER; note = 2' Fluoro-uridine
  modified_base 7: mod_base = OTHER; note = 2'O-methyl-uridine
  modified_base 8: mod_base = OTHER; note = 2' Fluoro-cytidine
  modified_base 9: mod_base = OTHER; note = 2'Fluoro-adenosine
  modified_base 10: mod_base = OTHER; note = 2'O-methyl-guanosine
  modified_base 11: mod_base = OTHER; note = 2'O-methyl-guanosine
  modified_base 12: mod_base = OTHER; note = 2'O-methyl-adenosine
  modified_base 13: mod_base = OTHER; note = 2'O-methyl-uridine
  modified_base 14: mod_base = OTHER; note = 2' Fluoro-uridine
  modified_base 15: mod_base = OTHER; note = 2'O-methyl-adenosine
  modified_base 16: mod_base = OTHER; note = 2'Fluoro-adenosine
  modified_base 17: mod_base = OTHER; note = 2'O-methyl-uridine
  modified_base 18: mod_base = OTHER; note = 2'O-methyl-cytidine
  modified_base 19: mod_base = OTHER; note = 2'O-methyl-uridine
  modified_base 20: mod_base = OTHER; note = 2'O-methyl-cytidine
  modified_base 21: mod_base = OTHER; note = 2'O-methyl-adenosine
  modified_base 22: mod_base = OTHER; note = 2'O-methyl-uridine
  modified_base 23: mod_base = OTHER; note = 2'O-methyl-cytidine
  modified_base 1..2: mod_base = OTHER; note = phosphorothioate linkage
  modified_base 2..3: mod_base = OTHER; note = phosphorothioate linkage
  modified_base 21..22: mod_base = OTHER; note = phosphorothioate linkage
  modified_base 22..23: mod_base = OTHER; note = phosphorothioate linkage
  source 1..23: mol_type = other RNA
ttggtttcaggattaatctcatc

SEQ ID NO: 210 - RNA, 23 nt, synthetic construct
  misc_feature 1..23: note = Description of origin: ZPI siRNA antisense strands
  misc_feature 1..23: note = Description of source:Antisense strand ID:
  modified_base 1: mod_base = OTHER; note = 2'O-methyl-guanosine
  modified_base 2: mod_base = OTHER; note = 2' Fluoro-uridine
  modified_base 3: mod_base = OTHER; note = 2'O-methyl-uridine
  modified_base 4: mod_base = OTHER; note = 2' Fluoro-uridine
  modified_base 5: mod_base = OTHER; note = 2'O-methyl-cytidine
  modified_base 6: mod_base = OTHER; note = 2'Fluoro-adenosine
  modified_base 7: mod_base = OTHER; note = 2'O-methyl-guanosine
  modified_base 8: mod_base = OTHER; note = 2' Fluoro-guanosine
  modified_base 9: mod_base = OTHER; note = 2'Fluoro-adenosine
  modified_base 10: mod_base = OTHER; note = 2'O-methyl-uridine
  modified_base 11: mod_base = OTHER; note = 2'O-methyl-uridine
  modified_base 12: mod_base = OTHER; note = 2'O-methyl-adenosine
  modified_base 13: mod_base = OTHER; note = 2'O-methyl-adenosine
  modified_base 14: mod_base = OTHER; note = 2' Fluoro-uridine
  modified_base 15: mod_base = OTHER; note = 2'O-methyl-cytidine
  modified_base 16: mod_base = OTHER; note = 2' Fluoro-uridine
  modified_base 17: mod_base = OTHER; note = 2'O-methyl-cytidine
  modified_base 18: mod_base = OTHER; note = 2'O-methyl-adenosine
  modified_base 19: mod_base = OTHER; note = 2'O-methyl-uridine
  modified_base 20: mod_base = OTHER; note = 2'O-methyl-cytidine
  modified_base 21: mod_base = OTHER; note = 2'O-methyl-adenosine
  modified_base 22: mod_base = OTHER; note = 2'O-methyl-adenosine
  modified_base 23: mod_base = OTHER; note = 2'O-methyl-adenosine
  modified_base 1..2: mod_base = OTHER; note = phosphorothioate linkage
  modified_base 2..3: mod_base = OTHER; note = phosphorothioate linkage
  modified_base 21..22: mod_base = OTHER; note = phosphorothioate linkage
  modified_base 22..23: mod_base = OTHER; note = phosphorothioate linkage
  source 1..23: mol_type = other RNA
gtttcaggattaatctcatcaaa

SEQ ID NO: 211 - RNA, 23 nt, synthetic construct
  misc_feature 1..23: note = Description of origin: ZPI siRNA antisense strands
  misc_feature 1..23: note = Description of source:Antisense strand ID:
  modified_base 1: mod_base = OTHER; note = 2'O-methyl-uridine
  modified_base 2: mod_base = OTHER; note = 2' Fluoro-guanosine
  modified_base 3: mod_base = OTHER; note = 2'O-methyl-guanosine
  modified_base 4: mod_base = OTHER; note = 2' Fluoro-uridine
  modified_base 5: mod_base = OTHER; note = 2'O-methyl-uridine
  modified_base 6: mod_base = OTHER; note = 2' Fluoro-uridine
  modified_base 7: mod_base = OTHER; note = 2'O-methyl-cytidine
  modified_base 8: mod_base = OTHER; note = 2'Fluoro-adenosine
  modified_base 9: mod_base = OTHER; note = 2' Fluoro-guanosine
  modified_base 10: mod_base = OTHER; note = 2'O-methyl-guanosine
  modified_base 11: mod_base = OTHER; note = 2'O-methyl-adenosine
  modified_base 12: mod_base = OTHER; note = 2'O-methyl-uridine
  modified_base 13: mod_base = OTHER; note = 2'O-methyl-uridine
  modified_base 14: mod_base = OTHER; note = 2'Fluoro-adenosine
  modified_base 15: mod_base = OTHER; note = 2'O-methyl-adenosine
  modified_base 16: mod_base = OTHER; note = 2' Fluoro-uridine
  modified_base 17: mod_base = OTHER; note = 2'O-methyl-cytidine
  modified_base 18: mod_base = OTHER; note = 2'O-methyl-uridine
  modified_base 19: mod_base = OTHER; note = 2'O-methyl-cytidine
  modified_base 20: mod_base = OTHER; note = 2'O-methyl-adenosine
  modified_base 21: mod_base = OTHER; note = 2'O-methyl-uridine
  modified_base 22: mod_base = OTHER; note = 2'O-methyl-cytidine
  modified_base 23: mod_base = OTHER; note = 2'O-methyl-adenosine
  modified_base 1..2: mod_base = OTHER; note = phosphorothioate linkage
  modified_base 2..3: mod_base = OTHER; note = phosphorothioate linkage
  modified_base 21..22: mod_base = OTHER; note = phosphorothioate linkage
  modified_base 22..23: mod_base = OTHER; note = phosphorothioate linkage
  source 1..23: mol_type = other RNA
tggtttcaggattaatctcatca

SEQ ID NO: 212 - RNA, 23 nt, synthetic construct
  misc_feature 1..23: note = Description of origin: ZPI siRNA antisense strands
  misc_feature 1..23: note = Description of source:Antisense strand ID:
  modified_base 1: mod_base = OTHER; note = 2'O-methyl-guanosine
  modified_base 2: mod_base = OTHER; note = 2' Fluoro-guanosine
  modified_base 3: mod_base = OTHER; note = 2'O-methyl-uridine
  modified_base 4: mod_base = OTHER; note = 2' Fluoro-uridine
  modified_base 5: mod_base = OTHER; note = 2'O-methyl-uridine
  modified_base 6: mod_base = OTHER; note = 2' Fluoro-cytidine
  modified_base 7: mod_base = OTHER; note = 2'O-methyl-adenosine
  modified_base 8: mod_base = OTHER; note = 2' Fluoro-guanosine
  modified_base 9: mod_base = OTHER; note = 2' Fluoro-guanosine
  modified_base 10: mod_base = OTHER; note = 2'O-methyl-adenosine
  modified_base 11: mod_base = OTHER; note = 2'O-methyl-uridine
  modified_base 12: mod_base = OTHER; note = 2'O-methyl-uridine
  modified_base 13: mod_base = OTHER; note = 2'O-methyl-adenosine
  modified_base 14: mod_base = OTHER; note = 2'Fluoro-adenosine
  modified_base 15: mod_base = OTHER; note = 2'O-methyl-uridine
  modified_base 16: mod_base = OTHER; note = 2' Fluoro-cytidine
  modified_base 17: mod_base = OTHER; note = 2'O-methyl-uridine
  modified_base 18: mod_base = OTHER; note = 2'O-methyl-cytidine
  modified_base 19: mod_base = OTHER; note = 2'O-methyl-adenosine
  modified_base 20: mod_base = OTHER; note = 2'O-methyl-uridine
  modified_base 21: mod_base = OTHER; note = 2'O-methyl-cytidine
  modified_base 22: mod_base = OTHER; note = 2'O-methyl-adenosine
  modified_base 23: mod_base = OTHER; note = 2'O-methyl-adenosine
  modified_base 1..2: mod_base = OTHER; note = phosphorothioate linkage
  modified_base 2..3: mod_base = OTHER; note = phosphorothioate linkage
  modified_base 21..22: mod_base = OTHER; note = phosphorothioate linkage
  modified_base 22..23: mod_base = OTHER; note = phosphorothioate linkage
  source 1..23: mol_type = other RNA
ggtttcaggattaatctcatcaa

SEQ ID NO: 213 - RNA, 23 nt, synthetic construct
  misc_feature 1..23: note = Description of origin: ZPI siRNA antisense strands
  misc_feature 1..23: note = Description of source:Antisense strand ID:
  modified_base 1: mod_base = OTHER; note = 2'O-methyl-adenosine
  modified_base 2: mod_base = OTHER; note = 2' Fluoro-guanosine
  modified_base 3: mod_base = OTHER; note = 2'O-methyl-guanosine
  modified_base 4: mod_base = OTHER; note = 2'Fluoro-adenosine
  modified_base 5: mod_base = OTHER; note = 2'O-methyl-uridine
  modified_base 6: mod_base = OTHER; note = 2' Fluoro-uridine
  modified_base 7: mod_base = OTHER; note = 2'O-methyl-adenosine
  modified_base 8: mod_base = OTHER; note = 2'Fluoro-adenosine
  modified_base 9: mod_base = OTHER; note = 2' Fluoro-uridine
  modified_base 10: mod_base = OTHER; note = 2'O-methyl-cytidine
  modified_base 11: mod_base = OTHER; note = 2'O-methyl-uridine
  modified_base 12: mod_base = OTHER; note = 2'O-methyl-cytidine
  modified_base 13: mod_base = OTHER; note = 2'O-methyl-adenosine
  modified_base 14: mod_base = OTHER; note = 2' Fluoro-uridine
  modified_base 15: mod_base = OTHER; note = 2'O-methyl-cytidine
  modified_base 16: mod_base = OTHER; note = 2'Fluoro-adenosine
  modified_base 17: mod_base = OTHER; note = 2'O-methyl-adenosine
  modified_base 18: mod_base = OTHER; note = 2'O-methyl-adenosine
  modified_base 19: mod_base = OTHER; note = 2'O-methyl-cytidine
  modified_base 20: mod_base = OTHER; note = 2'O-methyl-adenosine
  modified_base 21: mod_base = OTHER; note = 2'O-methyl-guanosine
  modified_base 22: mod_base = OTHER; note = 2'O-methyl-uridine
  modified_base 23: mod_base = OTHER; note = 2'O-methyl-uridine
  modified_base 1..2: mod_base = OTHER; note = phosphorothioate linkage
  modified_base 2..3: mod_base = OTHER; note = phosphorothioate linkage
  modified_base 21..22: mod_base = OTHER; note = phosphorothioate linkage
  modified_base 22..23: mod_base = OTHER; note = phosphorothioate linkage
  source 1..23: mol_type = other RNA
aggattaatctcatcaaacagtt

SEQ ID NO: 214 - RNA, 23 nt, synthetic construct
  misc_feature 1..23: note = Description of origin: ZPI siRNA antisense strands
  misc_feature 1..23: note = Description of source:Antisense strand ID:
  modified_base 1: mod_base = OTHER; note = 2'O-methyl-uridine
  modified_base 2: mod_base = OTHER; note = 2' Fluoro-cytidine
  modified_base 3: mod_base = OTHER; note = 2'O-methyl-cytidine
  modified_base 4: mod_base = OTHER; note = 2' Fluoro-uridine
  modified_base 5: mod_base = OTHER; note = 2'O-methyl-uridine
  modified_base 6: mod_base = OTHER; note = 2' Fluoro-guanosine
  modified_base 7: mod_base = OTHER; note = 2'O-methyl-uridine
  modified_base 8: mod_base = OTHER; note = 2' Fluoro-guanosine
  modified_base 9: mod_base = OTHER; note = 2' Fluoro-guanosine
  modified_base 10: mod_base = OTHER; note = 2'O-methyl-adenosine
  modified_base 11: mod_base = OTHER; note = 2'O-methyl-uridine
  modified_base 12: mod_base = OTHER; note = 2'O-methyl-guanosine
  modified_base 13: mod_base = OTHER; note = 2'O-methyl-adenosine
  modified_base 14: mod_base = OTHER; note = 2'Fluoro-adenosine
  modified_base 15: mod_base = OTHER; note = 2'O-methyl-guanosine
  modified_base 16: mod_base = OTHER; note = 2' Fluoro-guanosine
  modified_base 17: mod_base = OTHER; note = 2'O-methyl-cytidine
  modified_base 18: mod_base = OTHER; note = 2'O-methyl-adenosine
  modified_base 19: mod_base = OTHER; note = 2'O-methyl-adenosine
  modified_base 20: mod_base = OTHER; note = 2'O-methyl-adenosine
  modified_base 21: mod_base = OTHER; note = 2'O-methyl-adenosine
  modified_base 22: mod_base = OTHER; note = 2'O-methyl-cytidine
  modified_base 23: mod_base = OTHER; note = 2'O-methyl-uridine
  modified_base 1..2: mod_base = OTHER; note = phosphorothioate linkage
  modified_base 2..3: mod_base = OTHER; note = phosphorothioate linkage
  modified_base 21..22: mod_base = OTHER; note = phosphorothioate linkage
  modified_base 22..23: mod_base = OTHER; note = phosphorothioate linkage
  source 1..23: mol_type = other RNA
tccttgtggatgaaggcaaaact

SEQ ID NO: 215 - RNA, 23 nt, synthetic construct
  misc_feature 1..23: note = Description of origin: ZPI siRNA antisense strands
  misc_feature 1..23: note = Description of source:Antisense strand ID:
  modified_base 1: mod_base = OTHER; note = 2'O-methyl-guanosine
  modified_base 2: mod_base = OTHER; note = 2' Fluoro-uridine
  modified_base 3: mod_base = OTHER; note = 2'O-methyl-guanosine
  modified_base 4: mod_base = OTHER; note = 2' Fluoro-cytidine
  modified_base 5: mod_base = OTHER; note = 2'O-methyl-cytidine
  modified_base 6: mod_base = OTHER; note = 2' Fluoro-uridine
  modified_base 7: mod_base = OTHER; note = 2'O-methyl-cytidine
  modified_base 8: mod_base = OTHER; note = 2'Fluoro-adenosine
  modified_base 9: mod_base = OTHER; note = 2' Fluoro-uridine
  modified_base 10: mod_base = OTHER; note = 2'O-methyl-guanosine
  modified_base 11: mod_base = OTHER; note = 2'O-methyl-guanosine
  modified_base 12: mod_base = OTHER; note = 2'O-methyl-adenosine
  modified_base 13: mod_base = OTHER; note = 2'O-methyl-guanosine
  modified_base 14: mod_base = OTHER; note = 2'Fluoro-adenosine
  modified_base 15: mod_base = OTHER; note = 2'O-methyl-uridine
  modified_base 16: mod_base = OTHER; note = 2' Fluoro-cytidine
  modified_base 17: mod_base = OTHER; note = 2'O-methyl-uridine
  modified_base 18: mod_base = OTHER; note = 2'O-methyl-uridine
  modified_base 19: mod_base = OTHER; note = 2'O-methyl-uridine
  modified_base 20: mod_base = OTHER; note = 2'O-methyl-cytidine
  modified_base 21: mod_base = OTHER; note = 2'O-methyl-guanosine
  modified_base 22: mod_base = OTHER; note = 2'O-methyl-cytidine
  modified_base 23: mod_base = OTHER; note = 2'O-methyl-adenosine
  modified_base 1..2: mod_base = OTHER; note = phosphorothioate linkage
  modified_base 2..3: mod_base = OTHER; note = phosphorothioate linkage
  modified_base 21..22: mod_base = OTHER; note = phosphorothioate linkage
  modified_base 22..23: mod_base = OTHER; note = phosphorothioate linkage
  source 1..23: mol_type = other RNA
gtgcctcatggagatctttcgca

SEQ ID NO: 216 - RNA, 23 nt, synthetic construct
  misc_feature 1..23: note = Description of origin: ZPI siRNA antisense strands
  misc_feature 1..23: note = Description of source:Antisense strand ID:
  modified_base 1: mod_base = OTHER; note = 2'O-methyl-uridine
  modified_base 2: mod_base = OTHER; note = 2' Fluoro-cytidine
  modified_base 3: mod_base = OTHER; note = 2'O-methyl-uridine
  modified_base 4: mod_base = OTHER; note = 2' Fluoro-cytidine
  modified_base 5: mod_base = OTHER; note = 2'O-methyl-cytidine
  modified_base 6: mod_base = OTHER; note = 2'Fluoro-adenosine
  modified_base 7: mod_base = OTHER; note = 2'O-methyl-uridine
  modified_base 8: mod_base = OTHER; note = 2' Fluoro-guanosine
  modified_base 9: mod_base = OTHER; note = 2'Fluoro-adenosine
  modified_base 10: mod_base = OTHER; note = 2'O-methyl-guanosine
  modified_base 11: mod_base = OTHER; note = 2'O-methyl-guanosine
  modified_base 12: mod_base = OTHER; note = 2'O-methyl-adenosine
  modified_base 13: mod_base = OTHER; note = 2'O-methyl-cytidine
  modified_base 14: mod_base = OTHER; note = 2' Fluoro-cytidine
  modified_base 15: mod_base = OTHER; note = 2'O-methyl-adenosine
  modified_base 16: mod_base = OTHER; note = 2' Fluoro-cytidine
  modified_base 17: mod_base = OTHER; note = 2'O-methyl-cytidine
  modified_base 18: mod_base = OTHER; note = 2'O-methyl-adenosine
  modified_base 19: mod_base = OTHER; note = 2'O-methyl-guanosine
  modified_base 20: mod_base = OTHER; note = 2'O-methyl-cytidine
  modified_base 21: mod_base = OTHER; note = 2'O-methyl-adenosine
  modified_base 22: mod_base = OTHER; note = 2'O-methyl-uridine
  modified_base 23: mod_base = OTHER; note = 2'O-methyl-guanosine
  modified_base 1..2: mod_base = OTHER; note = phosphorothioate linkage
  modified_base 2..3: mod_base = OTHER; note = phosphorothioate linkage
  modified_base 21..22: mod_base = OTHER; note = phosphorothioate linkage
  modified_base 22..23: mod_base = OTHER; note = phosphorothioate linkage
  source 1..23: mol_type = other RNA
tctccatgaggaccaccagcatg

SEQ ID NO: 217 - RNA, 23 nt, synthetic construct
  misc_feature 1..23: note = Description of origin: ZPI siRNA antisense strands
  misc_feature 1..23: note = Description of source:Antisense strand ID:
  modified_base 1: mod_base = OTHER; note = 2'O-methyl-cytidine
  modified_base 2: mod_base = OTHER; note = 2'Fluoro-adenosine
  modified_base 3: mod_base = OTHER; note = 2'O-methyl-adenosine
  modified_base 4: mod_base = OTHER; note = 2'Fluoro-adenosine
  modified_base 5: mod_base = OTHER; note = 2'O-methyl-adenosine
  modified_base 6: mod_base = OTHER; note = 2' Fluoro-uridine
  modified_base 7: mod_base = OTHER; note = 2'O-methyl-cytidine
  modified_base 8: mod_base = OTHER; note = 2' Fluoro-cytidine
  modified_base 9: mod_base = OTHER; note = 2' Fluoro-uridine
  modified_base 10: mod_base = OTHER; note = 2'O-methyl-uridine
  modified_base 11: mod_base = OTHER; note = 2'O-methyl-guanosine
  modified_base 12: mod_base = OTHER; note = 2'O-methyl-uridine
  modified_base 13: mod_base = OTHER; note = 2'O-methyl-guanosine
  modified_base 14: mod_base = OTHER; note = 2' Fluoro-guanosine
  modified_base 15: mod_base = OTHER; note = 2'O-methyl-adenosine
  modified_base 16: mod_base = OTHER; note = 2' Fluoro-uridine
  modified_base 17: mod_base = OTHER; note = 2'O-methyl-guanosine
  modified_base 18: mod_base = OTHER; note = 2'O-methyl-adenosine
  modified_base 19: mod_base = OTHER; note = 2'O-methyl-adenosine
  modified_base 20: mod_base = OTHER; note = 2'O-methyl-guanosine
  modified_base 21: mod_base = OTHER; note = 2'O-methyl-guanosine
  modified_base 22: mod_base = OTHER; note = 2'O-methyl-cytidine
  modified_base 23: mod_base = OTHER; note = 2'O-methyl-adenosine
  modified_base 1..2: mod_base = OTHER; note = phosphorothioate linkage
  modified_base 2..3: mod_base = OTHER; note = phosphorothioate linkage
  modified_base 21..22: mod_base = OTHER; note = phosphorothioate linkage
  modified_base 22..23: mod_base = OTHER; note = phosphorothioate linkage
  source 1..23: mol_type = other RNA
caaaatccttgtggatgaaggca

SEQ ID NO: 218 - RNA, 23 nt, synthetic construct
  misc_feature 1..23: note = Description of origin: ZPI siRNA antisense strands
  misc_feature 1..23: note = Description of source:Antisense strand ID:
  modified_base 1: mod_base = OTHER; note = 2'O-methyl-cytidine
  modified_base 2: mod_base = OTHER; note = 2' Fluoro-guanosine
  modified_base 3: mod_base = OTHER; note = 2'O-methyl-uridine
  modified_base 4: mod_base = OTHER; note = 2' Fluoro-guanosine
  modified_base 5: mod_base = OTHER; note = 2'O-methyl-cytidine
  modified_base 6: mod_base = OTHER; note = 2' Fluoro-cytidine
  modified_base 7: mod_base = OTHER; note = 2'O-methyl-uridine
  modified_base 8: mod_base = OTHER; note = 2' Fluoro-cytidine
  modified_base 9: mod_base = OTHER; note = 2'Fluoro-adenosine
  modified_base 10: mod_base = OTHER; note = 2'O-methyl-uridine
  modified_base 11: mod_base = OTHER; note = 2'O-methyl-guanosine
  modified_base 12: mod_base = OTHER; note = 2'O-methyl-guanosine
  modified_base 13: mod_base = OTHER; note = 2'O-methyl-adenosine
  modified_base 14: mod_base = OTHER; note = 2' Fluoro-guanosine
  modified_base 15: mod_base = OTHER; note = 2'O-methyl-adenosine
  modified_base 16: mod_base = OTHER; note = 2' Fluoro-uridine
  modified_base 17: mod_base = OTHER; note = 2'O-methyl-cytidine
  modified_base 18: mod_base = OTHER; note = 2'O-methyl-uridine
  modified_base 19: mod_base = OTHER; note = 2'O-methyl-uridine
  modified_base 20: mod_base = OTHER; note = 2'O-methyl-uridine
  modified_base 21: mod_base = OTHER; note = 2'O-methyl-cytidine
  modified_base 22: mod_base = OTHER; note = 2'O-methyl-guanosine
  modified_base 23: mod_base = OTHER; note = 2'O-methyl-cytidine
  modified_base 1..2: mod_base = OTHER; note = phosphorothioate linkage
  modified_base 2..3: mod_base = OTHER; note = phosphorothioate linkage
  modified_base 21..22: mod_base = OTHER; note = phosphorothioate linkage
  modified_base 22..23: mod_base = OTHER; note = phosphorothioate linkage
  source 1..23: mol_type = other RNA
cgtgcctcatggagatctttcgc

SEQ ID NO: 219 - RNA, 23 nt, synthetic construct
  misc_feature 1..23: note = Description of origin: ZPI siRNA antisense strands
  misc_feature 1..23: note = Description of source:Antisense strand ID:
  modified_base 1: mod_base = OTHER; note = 2'O-methyl-adenosine
  modified_base 2: mod_base = OTHER; note = 2' Fluoro-uridine
  modified_base 3: mod_base = OTHER; note = 2'O-methyl-cytidine
  modified_base 4: mod_base = OTHER; note = 2'Fluoro-adenosine
  modified_base 5: mod_base = OTHER; note = 2'O-methyl-adenosine
  modified_base 6: mod_base = OTHER; note = 2'Fluoro-adenosine
  modified_base 7: mod_base = OTHER; note = 2'O-methyl-adenosine
  modified_base 8: mod_base = OTHER; note = 2' Fluoro-uridine
  modified_base 9: mod_base = OTHER; note = 2' Fluoro-cytidine
  modified_base 10: mod_base = OTHER; note = 2'O-methyl-cytidine
  modified_base 11: mod_base = OTHER; note = 2'O-methyl-uridine
  modified_base 12: mod_base = OTHER; note = 2'O-methyl-uridine
  modified_base 13: mod_base = OTHER; note = 2'O-methyl-guanosine
  modified_base 14: mod_base = OTHER; note = 2' Fluoro-uridine
  modified_base 15: mod_base = OTHER; note = 2'O-methyl-guanosine
  modified_base 16: mod_base = OTHER; note = 2' Fluoro-guanosine
  modified_base 17: mod_base = OTHER; note = 2'O-methyl-adenosine
  modified_base 18: mod_base = OTHER; note = 2'O-methyl-uridine
  modified_base 19: mod_base = OTHER; note = 2'O-methyl-guanosine
  modified_base 20: mod_base = OTHER; note = 2'O-methyl-adenosine
  modified_base 21: mod_base = OTHER; note = 2'O-methyl-adenosine
  modified_base 22: mod_base = OTHER; note = 2'O-methyl-guanosine
  modified_base 23: mod_base = OTHER; note = 2'O-methyl-guanosine
  modified_base 1..2: mod_base = OTHER; note = phosphorothioate linkage
  modified_base 2..3: mod_base = OTHER; note = phosphorothioate linkage
  modified_base 21..22: mod_base = OTHER; note = phosphorothioate linkage
  modified_base 22..23: mod_base = OTHER; note = phosphorothioate linkage
  source 1..23: mol_type = other RNA
atcaaaatccttgtggatgaagg

SEQ ID NO: 220 - RNA, 23 nt, synthetic construct
  misc_feature 1..23: note = Description of origin: ZPI siRNA antisense strands
  misc_feature 1..23: note = Description of source:Antisense strand ID:
  modified_base 1: mod_base = OTHER; note = 2'O-methyl-uridine
  modified_base 2: mod_base = OTHER; note = 2' Fluoro-uridine
  modified_base 3: mod_base = OTHER; note = 2'O-methyl-cytidine
  modified_base 4: mod_base = OTHER; note = 2'Fluoro-adenosine
  modified_base 5: mod_base = OTHER; note = 2'O-methyl-guanosine
  modified_base 6: mod_base = OTHER; note = 2' Fluoro-guanosine
  modified_base 7: mod_base = OTHER; note = 2'O-methyl-adenosine
  modified_base 8: mod_base = OTHER; note = 2' Fluoro-uridine
  modified_base 9: mod_base = OTHER; note = 2' Fluoro-uridine
  modified_base 10: mod_base = OTHER; note = 2'O-methyl-adenosine
  modified_base 11: mod_base = OTHER; note = 2'O-methyl-adenosine
  modified_base 12: mod_base = OTHER; note = 2'O-methyl-uridine
  modified_base 13: mod_base = OTHER; note = 2'O-methyl-cytidine
  modified_base 14: mod_base = OTHER; note = 2' Fluoro-uridine
  modified_base 15: mod_base = OTHER; note = 2'O-methyl-cytidine
  modified_base 16: mod_base = OTHER; note = 2'Fluoro-adenosine
  modified_base 17: mod_base = OTHER; note = 2'O-methyl-uridine
  modified_base 18: mod_base = OTHER; note = 2'O-methyl-cytidine
  modified_base 19: mod_base = OTHER; note = 2'O-methyl-adenosine
  modified_base 20: mod_base = OTHER; note = 2'O-methyl-adenosine
  modified_base 21: mod_base = OTHER; note = 2'O-methyl-adenosine
  modified_base 22: mod_base = OTHER; note = 2'O-methyl-cytidine
  modified_base 23: mod_base = OTHER; note = 2'O-methyl-adenosine
  modified_base 1..2: mod_base = OTHER; note = phosphorothioate linkage
  modified_base 2..3: mod_base = OTHER; note = phosphorothioate linkage
  modified_base 21..22: mod_base = OTHER; note = phosphorothioate linkage
  modified_base 22..23: mod_base = OTHER; note = phosphorothioate linkage
  source 1..23: mol_type = other RNA
ttcaggattaatctcatcaaaca

SEQ ID NO: 221 - RNA, 23 nt, synthetic construct
  misc_feature 1..23: note = Description of origin: ZPI siRNA antisense strands
  misc_feature 1..23: note = Description of source:Antisense strand ID:
  modified_base 1: mod_base = OTHER; note = 2'O-methyl-adenosine
  modified_base 2: mod_base = OTHER; note = 2'Fluoro-adenosine
  modified_base 3: mod_base = OTHER; note = 2'O-methyl-uridine
  modified_base 4: mod_base = OTHER; note = 2' Fluoro-cytidine
  modified_base 5: mod_base = OTHER; note = 2'O-methyl-cytidine
  modified_base 6: mod_base = OTHER; note = 2' Fluoro-uridine
  modified_base 7: mod_base = OTHER; note = 2'O-methyl-uridine
  modified_base 8: mod_base = OTHER; note = 2' Fluoro-guanosine
  modified_base 9: mod_base = OTHER; note = 2' Fluoro-uridine
  modified_base 10: mod_base = OTHER; note = 2'O-methyl-guanosine
  modified_base 11: mod_base = OTHER; note = 2'O-methyl-guanosine
  modified_base 12: mod_base = OTHER; note = 2'O-methyl-adenosine
  modified_base 13: mod_base = OTHER; note = 2'O-methyl-uridine
  modified_base 14: mod_base = OTHER; note = 2' Fluoro-guanosine
  modified_base 15: mod_base = OTHER; note = 2'O-methyl-adenosine
  modified_base 16: mod_base = OTHER; note = 2'Fluoro-adenosine
  modified_base 17: mod_base = OTHER; note = 2'O-methyl-guanosine
  modified_base 18: mod_base = OTHER; note = 2'O-methyl-guanosine
  modified_base 19: mod_base = OTHER; note = 2'O-methyl-cytidine
  modified_base 20: mod_base = OTHER; note = 2'O-methyl-adenosine
  modified_base 21: mod_base = OTHER; note = 2'O-methyl-adenosine
  modified_base 22: mod_base = OTHER; note = 2'O-methyl-adenosine
  modified_base 23: mod_base = OTHER; note = 2'O-methyl-adenosine
  modified_base 1..2: mod_base = OTHER; note = phosphorothioate linkage
  modified_base 2..3: mod_base = OTHER; note = phosphorothioate linkage
  modified_base 21..22: mod_base = OTHER; note = phosphorothioate linkage
  modified_base 22..23: mod_base = OTHER; note = phosphorothioate linkage
  source 1..23: mol_type = other RNA
aatccttgtggatgaaggcaaaa

SEQ ID NO: 222 - RNA, 23 nt, synthetic construct
  misc_feature 1..23: note = Description of origin: ZPI siRNA antisense strands
  misc_feature 1..23: note = Description of source:Antisense strand ID:
  modified_base 1: mod_base = OTHER; note = 2'O-methyl-cytidine
  modified_base 2: mod_base = OTHER; note = 2' Fluoro-cytidine
  modified_base 3: mod_base = OTHER; note = 2'O-methyl-adenosine
  modified_base 4: mod_base = OTHER; note = 2' Fluoro-uridine
  modified_base 5: mod_base = OTHER; note = 2'O-methyl-cytidine
  modified_base 6: mod_base = OTHER; note = 2' Fluoro-guanosine
  modified_base 7: mod_base = OTHER; note = 2'O-methyl-uridine
  modified_base 8: mod_base = OTHER; note = 2' Fluoro-guanosine
  modified_base 9: mod_base = OTHER; note = 2' Fluoro-cytidine
  modified_base 10: mod_base = OTHER; note = 2'O-methyl-cytidine
  modified_base 11: mod_base = OTHER; note = 2'O-methyl-uridine
  modified_base 12: mod_base = OTHER; note = 2'O-methyl-cytidine
  modified_base 13: mod_base = OTHER; note = 2'O-methyl-adenosine
  modified_base 14: mod_base = OTHER; note = 2' Fluoro-uridine
  modified_base 15: mod_base = OTHER; note = 2'O-methyl-guanosine
  modified_base 16: mod_base = OTHER; note = 2' Fluoro-guanosine
  modified_base 17: mod_base = OTHER; note = 2'O-methyl-adenosine
  modified_base 18: mod_base = OTHER; note = 2'O-methyl-guanosine
  modified_base 19: mod_base = OTHER; note = 2'O-methyl-adenosine
  modified_base 20: mod_base = OTHER; note = 2'O-methyl-uridine
  modified_base 21: mod_base = OTHER; note = 2'O-methyl-cytidine
  modified_base 22: mod_base = OTHER; note = 2'O-methyl-uridine
  modified_base 23: mod_base = OTHER; note = 2'O-methyl-uridine
  modified_base 1..2: mod_base = OTHER; note = phosphorothioate linkage
  modified_base 2..3: mod_base = OTHER; note = phosphorothioate linkage
  modified_base 21..22: mod_base = OTHER; note = phosphorothioate linkage
  modified_base 22..23: mod_base = OTHER; note = phosphorothioate linkage
  source 1..23: mol_type = other RNA
ccatcgtgcctcatggagatctt

SEQ ID NO: 223 - RNA, 23 nt, synthetic construct
  misc_feature 1..23: note = Description of origin: ZPI siRNA antisense strands
  misc_feature 1..23: note = Description of source:Antisense strand ID:
  modified_base 1: mod_base = OTHER; note = 2'O-methyl-adenosine
  modified_base 2: mod_base = OTHER; note = 2'Fluoro-adenosine
  modified_base 3: mod_base = OTHER; note = 2'O-methyl-adenosine
  modified_base 4: mod_base = OTHER; note = 2' Fluoro-uridine
  modified_base 5: mod_base = OTHER; note = 2'O-methyl-cytidine
  modified_base 6: mod_base = OTHER; note = 2' Fluoro-cytidine
  modified_base 7: mod_base = OTHER; note = 2'O-methyl-uridine
  modified_base 8: mod_base = OTHER; note = 2' Fluoro-uridine
  modified_base 9: mod_base = OTHER; note = 2' Fluoro-guanosine
  modified_base 10: mod_base = OTHER; note = 2'O-methyl-uridine
  modified_base 11: mod_base = OTHER; note = 2'O-methyl-guanosine
  modified_base 12: mod_base = OTHER; note = 2'O-methyl-guanosine
  modified_base 13: mod_base = OTHER; note = 2'O-methyl-adenosine
  modified_base 14: mod_base = OTHER; note = 2' Fluoro-uridine
  modified_base 15: mod_base = OTHER; note = 2'O-methyl-guanosine
  modified_base 16: mod_base = OTHER; note = 2'Fluoro-adenosine
  modified_base 17: mod_base = OTHER; note = 2'O-methyl-adenosine
  modified_base 18: mod_base = OTHER; note = 2'O-methyl-guanosine
  modified_base 19: mod_base = OTHER; note = 2'O-methyl-guanosine
  modified_base 20: mod_base = OTHER; note = 2'O-methyl-cytidine
  modified_base 21: mod_base = OTHER; note = 2'O-methyl-adenosine
  modified_base 22: mod_base = OTHER; note = 2'O-methyl-adenosine
  modified_base 23: mod_base = OTHER; note = 2'O-methyl-adenosine
  modified_base 1..2: mod_base = OTHER; note = phosphorothioate linkage
  modified_base 2..3: mod_base = OTHER; note = phosphorothioate linkage
  modified_base 21..22: mod_base = OTHER; note = phosphorothioate linkage
  modified_base 22..23: mod_base = OTHER; note = phosphorothioate linkage
  source 1..23: mol_type = other RNA
aaatccttgtggatgaaggcaaa

SEQ ID NO: 224 - RNA, 23 nt, synthetic construct
  misc_feature 1..23: note = Description of origin: ZPI siRNA antisense strands
  misc_feature 1..23: note = Description of source:Antisense strand ID:
  modified_base 1: mod_base = OTHER; note = 2'O-methyl-guanosine
  modified_base 2: mod_base = OTHER; note = 2' Fluoro-cytidine
  modified_base 3: mod_base = OTHER; note = 2'O-methyl-cytidine
  modified_base 4: mod_base = OTHER; note = 2' Fluoro-uridine
  modified_base 5: mod_base = OTHER; note = 2'O-methyl-cytidine
  modified_base 6: mod_base = OTHER; note = 2'Fluoro-adenosine
  modified_base 7: mod_base = OTHER; note = 2'O-methyl-uridine
  modified_base 8: mod_base = OTHER; note = 2' Fluoro-guanosine
  modified_base 9: mod_base = OTHER; note = 2' Fluoro-guanosine
  modified_base 10: mod_base = OTHER; note = 2'O-methyl-adenosine
  modified_base 11: mod_base = OTHER; note = 2'O-methyl-guanosine
  modified_base 12: mod_base = OTHER; note = 2'O-methyl-adenosine
  modified_base 13: mod_base = OTHER; note = 2'O-methyl-uridine
  modified_base 14: mod_base = OTHER; note = 2' Fluoro-cytidine
  modified_base 15: mod_base = OTHER; note = 2'O-methyl-uridine
  modified_base 16: mod_base = OTHER; note = 2' Fluoro-uridine
  modified_base 17: mod_base = OTHER; note = 2'O-methyl-uridine
  modified_base 18: mod_base = OTHER; note = 2'O-methyl-cytidine
  modified_base 19: mod_base = OTHER; note = 2'O-methyl-guanosine
  modified_base 20: mod_base = OTHER; note = 2'O-methyl-cytidine
  modified_base 21: mod_base = OTHER; note = 2'O-methyl-adenosine
  modified_base 22: mod_base = OTHER; note = 2'O-methyl-guanosine
  modified_base 23: mod_base = OTHER; note = 2'O-methyl-cytidine
  modified_base 1..2: mod_base = OTHER; note = phosphorothioate linkage
  modified_base 2..3: mod_base = OTHER; note = phosphorothioate linkage
  modified_base 21..22: mod_base = OTHER; note = phosphorothioate linkage
  modified_base 22..23: mod_base = OTHER; note = phosphorothioate linkage
  source 1..23: mol_type = other RNA
gcctcatggagatctttcgcagc

SEQ ID NO: 225 - RNA, 23 nt, synthetic construct
  misc_feature 1..23: note = Description of origin: ZPI siRNA antisense strands
  misc_feature 1..23: note = Description of source:Antisense strand ID:
  modified_base 1: mod_base = OTHER; note = 2'O-methyl-uridine
  modified_base 2: mod_base = OTHER; note = 2' Fluoro-uridine
  modified_base 3: mod_base = OTHER; note = 2'O-methyl-cytidine
  modified_base 4: mod_base = OTHER; note = 2' Fluoro-uridine
  modified_base 5: mod_base = OTHER; note = 2'O-methyl-cytidine
  modified_base 6: mod_base = OTHER; note = 2' Fluoro-cytidine
  modified_base 7: mod_base = OTHER; note = 2'O-methyl-adenosine
  modified_base 8: mod_base = OTHER; note = 2' Fluoro-uridine
  modified_base 9: mod_base = OTHER; note = 2' Fluoro-guanosine
  modified_base 10: mod_base = OTHER; note = 2'O-methyl-adenosine
  modified_base 11: mod_base = OTHER; note = 2'O-methyl-guanosine
  modified_base 12: mod_base = OTHER; note = 2'O-methyl-guanosine
  modified_base 13: mod_base = OTHER; note = 2'O-methyl-adenosine
  modified_base 14: mod_base = OTHER; note = 2' Fluoro-cytidine
  modified_base 15: mod_base = OTHER; note = 2'O-methyl-cytidine
  modified_base 16: mod_base = OTHER; note = 2'Fluoro-adenosine
  modified_base 17: mod_base = OTHER; note = 2'O-methyl-cytidine
  modified_base 18: mod_base = OTHER; note = 2'O-methyl-cytidine
  modified_base 19: mod_base = OTHER; note = 2'O-methyl-adenosine
  modified_base 20: mod_base = OTHER; note = 2'O-methyl-guanosine
  modified_base 21: mod_base = OTHER; note = 2'O-methyl-cytidine
  modified_base 22: mod_base = OTHER; note = 2'O-methyl-adenosine
  modified_base 23: mod_base = OTHER; note = 2'O-methyl-uridine
  modified_base 1..2: mod_base = OTHER; note = phosphorothioate linkage
  modified_base 2..3: mod_base = OTHER; note = phosphorothioate linkage
  modified_base 21..22: mod_base = OTHER; note = phosphorothioate linkage
  modified_base 22..23: mod_base = OTHER; note = phosphorothioate linkage
  source 1..23: mol_type = other RNA
ttctccatgaggaccaccagcat

SEQ ID NO: 226 - RNA, 23 nt, synthetic construct
  misc_feature 1..23: note = Description of origin: ZPI siRNA antisense strands
  misc_feature 1..23: note = Description of source:Antisense strand ID:
  modified_base 1: mod_base = OTHER; note = 2'O-methyl-uridine
  modified_base 2: mod_base = OTHER; note = 2' Fluoro-guanosine
  modified_base 3: mod_base = OTHER; note = 2'O-methyl-cytidine
  modified_base 4: mod_base = OTHER; note = 2' Fluoro-cytidine
  modified_base 5: mod_base = OTHER; note = 2'O-methyl-uridine
  modified_base 6: mod_base = OTHER; note = 2' Fluoro-cytidine
  modified_base 7: mod_base = OTHER; note = 2'O-methyl-adenosine
  modified_base 8: mod_base = OTHER; note = 2' Fluoro-uridine
  modified_base 9: mod_base = OTHER; note = 2' Fluoro-guanosine
  modified_base 10: mod_base = OTHER; note = 2'O-methyl-guanosine
  modified_base 11: mod_base = OTHER; note = 2'O-methyl-adenosine
  modified_base 12: mod_base = OTHER; note = 2'O-methyl-guanosine
  modified_base 13: mod_base = OTHER; note = 2'O-methyl-adenosine
  modified_base 14: mod_base = OTHER; note = 2' Fluoro-uridine
  modified_base 15: mod_base = OTHER; note = 2'O-methyl-cytidine
  modified_base 16: mod_base = OTHER; note = 2' Fluoro-uridine
  modified_base 17: mod_base = OTHER; note = 2'O-methyl-uridine
  modified_base 18: mod_base = OTHER; note = 2'O-methyl-uridine
  modified_base 19: mod_base = OTHER; note = 2'O-methyl-cytidine
  modified_base 20: mod_base = OTHER; note = 2'O-methyl-guanosine
  modified_base 21: mod_base = OTHER; note = 2'O-methyl-cytidine
  modified_base 22: mod_base = OTHER; note = 2'O-methyl-adenosine
  modified_base 23: mod_base = OTHER; note = 2'O-methyl-guanosine
  modified_base 1..2: mod_base = OTHER; note = phosphorothioate linkage
  modified_base 2..3: mod_base = OTHER; note = phosphorothioate linkage
  modified_base 21..22: mod_base = OTHER; note = phosphorothioate linkage
  modified_base 22..23: mod_base = OTHER; note = phosphorothioate linkage
  source 1..23: mol_type = other RNA
tgcctcatggagatctttcgcag

SEQ ID NO: 227 - RNA, 23 nt, synthetic construct
  misc_feature 1..23: note = Description of origin: ZPI siRNA antisense strands
  misc_feature 1..23: note = Description of source:Antisense strand ID:
  modified_base 1: mod_base = OTHER; note = 2'O-methyl-adenosine
  modified_base 2: mod_base = OTHER; note = 2' Fluoro-guanosine
  modified_base 3: mod_base = OTHER; note = 2'O-methyl-cytidine
  modified_base 4: mod_base = OTHER; note = 2'Fluoro-adenosine
  modified_base 5: mod_base = OTHER; note = 2'O-methyl-guanosine
  modified_base 6: mod_base = OTHER; note = 2' Fluoro-cytidine
  modified_base 7: mod_base = OTHER; note = 2'O-methyl-uridine
  modified_base 8: mod_base = OTHER; note = 2' Fluoro-cytidine
  modified_base 9: mod_base = OTHER; note = 2'Fluoro-adenosine
  modified_base 10: mod_base = OTHER; note = 2'O-methyl-uridine
  modified_base 11: mod_base = OTHER; note = 2'O-methyl-guanosine
  modified_base 12: mod_base = OTHER; note = 2'O-methyl-cytidine
  modified_base 13: mod_base = OTHER; note = 2'O-methyl-adenosine
  modified_base 14: mod_base = OTHER; note = 2' Fluoro-uridine
  modified_base 15: mod_base = OTHER; note = 2'O-methyl-cytidine
  modified_base 16: mod_base = OTHER; note = 2' Fluoro-uridine
  modified_base 17: mod_base = OTHER; note = 2'O-methyl-cytidine
  modified_base 18: mod_base = OTHER; note = 2'O-methyl-adenosine
  modified_base 19: mod_base = OTHER; note = 2'O-methyl-uridine
  modified_base 20: mod_base = OTHER; note = 2'O-methyl-adenosine
  modified_base 21: mod_base = OTHER; note = 2'O-methyl-cytidine
  modified_base 22: mod_base = OTHER; note = 2'O-methyl-uridine
  modified_base 23: mod_base = OTHER; note = 2'O-methyl-uridine
  modified_base 1..2: mod_base = OTHER; note = phosphorothioate linkage
  modified_base 2..3: mod_base = OTHER; note = phosphorothioate linkage
  modified_base 21..22: mod_base = OTHER; note = phosphorothioate linkage
  modified_base 22..23: mod_base = OTHER; note = phosphorothioate linkage
  source 1..23: mol_type = other RNA
agcagctcatgcatctcatactt

SEQ ID NO: 228 - RNA, 23 nt, synthetic construct
  misc_feature 1..23: note = Description of origin: ZPI siRNA antisense strands
  misc_feature 1..23: note = Description of source:Antisense strand ID:
  modified_base 1: mod_base = OTHER; note = 2'O-methyl-uridine
  modified_base 2: mod_base = OTHER; note = 2' Fluoro-cytidine
  modified_base 3: mod_base = OTHER; note = 2'O-methyl-adenosine
  modified_base 4: mod_base = OTHER; note = 2' Fluoro-guanosine
  modified_base 5: mod_base = OTHER; note = 2'O-methyl-guanosine
  modified_base 6: mod_base = OTHER; note = 2'Fluoro-adenosine
  modified_base 7: mod_base = OTHER; note = 2'O-methyl-uridine
  modified_base 8: mod_base = OTHER; note = 2' Fluoro-uridine
  modified_base 9: mod_base = OTHER; note = 2'Fluoro-adenosine
  modified_base 10: mod_base = OTHER; note = 2'O-methyl-adenosine
  modified_base 11: mod_base = OTHER; note = 2'O-methyl-uridine
  modified_base 12: mod_base = OTHER; note = 2'O-methyl-cytidine
  modified_base 13: mod_base = OTHER; note = 2'O-methyl-uridine
  modified_base 14: mod_base = OTHER; note = 2' Fluoro-cytidine
  modified_base 15: mod_base = OTHER; note = 2'O-methyl-adenosine
  modified_base 16: mod_base = OTHER; note = 2' Fluoro-uridine
  modified_base 17: mod_base = OTHER; note = 2'O-methyl-cytidine
  modified_base 18: mod_base = OTHER; note = 2'O-methyl-adenosine
  modified_base 19: mod_base = OTHER; note = 2'O-methyl-adenosine
  modified_base 20: mod_base = OTHER; note = 2'O-methyl-adenosine
  modified_base 21: mod_base = OTHER; note = 2'O-methyl-cytidine
  modified_base 22: mod_base = OTHER; note = 2'O-methyl-adenosine
  modified_base 23: mod_base = OTHER; note = 2'O-methyl-guanosine
  modified_base 1..2: mod_base = OTHER; note = phosphorothioate linkage
  modified_base 2..3: mod_base = OTHER; note = phosphorothioate linkage
  modified_base 21..22: mod_base = OTHER; note = phosphorothioate linkage
  modified_base 22..23: mod_base = OTHER; note = phosphorothioate linkage
  source 1..23: mol_type = other RNA
tcaggattaatctcatcaaacag

SEQ ID NO: 229 - RNA, 23 nt, synthetic construct
  misc_feature 1..23: note = Description of origin: ZPI siRNA antisense strands
  misc_feature 1..23: note = Description of source:Antisense strand ID:
  modified_base 1: mod_base = OTHER; note = 2'O-methyl-uridine
  modified_base 2: mod_base = OTHER; note = 2' Fluoro-uridine
  modified_base 3: mod_base = OTHER; note = 2'O-methyl-guanosine
  modified_base 4: mod_base = OTHER; note = 2' Fluoro-guanosine
  modified_base 5: mod_base = OTHER; note = 2'O-methyl-uridine
  modified_base 6: mod_base = OTHER; note = 2' Fluoro-uridine
  modified_base 7: mod_base = OTHER; note = 2'O-methyl-uridine
  modified_base 8: mod_base = OTHER; note = 2' Fluoro-cytidine
  modified_base 9: mod_base = OTHER; note = 2'Fluoro-adenosine
  modified_base 10: mod_base = OTHER; note = 2'O-methyl-guanosine
  modified_base 11: mod_base = OTHER; note = 2'O-methyl-guanosine
  modified_base 12: mod_base = OTHER; note = 2'O-methyl-adenosine
  modified_base 13: mod_base = OTHER; note = 2'O-methyl-uridine
  modified_base 14: mod_base = OTHER; note = 2' Fluoro-uridine
  modified_base 15: mod_base = OTHER; note = 2'O-methyl-adenosine
  modified_base 16: mod_base = OTHER; note = 2'Fluoro-adenosine
  modified_base 17: mod_base = OTHER; note = 2'O-methyl-uridine
  modified_base 18: mod_base = OTHER; note = 2'O-methyl-cytidine
  modified_base 19: mod_base = OTHER; note = 2'O-methyl-uridine
  modified_base 20: mod_base = OTHER; note = 2'O-methyl-cytidine
  modified_base 21: mod_base = OTHER; note = 2'O-methyl-adenosine
  modified_base 22: mod_base = OTHER; note = 2'O-methyl-uridine
  modified_base 23: mod_base = OTHER; note = 2'O-methyl-cytidine
  modified_base 1..2: mod_base = OTHER; note = phosphorothioate linkage
  modified_base 2..3: mod_base = OTHER; note = phosphorothioate linkage
  modified_base 21..22: mod_base = OTHER; note = phosphorothioate linkage
  modified_base 22..23: mod_base = OTHER; note = phosphorothioate linkage
  source 1..23: mol_type = other RNA
ttggtttcaggattaatctcatc

SEQ ID NO: 230 - RNA, 23 nt, synthetic construct
  misc_feature 1..23: note = Description of origin: ZPI siRNA antisense strands
  misc_feature 1..23: note = Description of source:Antisense strand ID:
  modified_base 1: mod_base = OTHER; note = 2'O-methyl-guanosine
  modified_base 2: mod_base = OTHER; note = 2' Fluoro-uridine
  modified_base 3: mod_base = OTHER; note = 2'O-methyl-uridine
  modified_base 4: mod_base = OTHER; note = 2' Fluoro-uridine
  modified_base 5: mod_base = OTHER; note = 2'O-methyl-cytidine
  modified_base 6: mod_base = OTHER; note = 2'Fluoro-adenosine
  modified_base 7: mod_base = OTHER; note = 2'O-methyl-guanosine
  modified_base 8: mod_base = OTHER; note = 2' Fluoro-guanosine
  modified_base 9: mod_base = OTHER; note = 2'Fluoro-adenosine
  modified_base 10: mod_base = OTHER; note = 2'O-methyl-uridine
  modified_base 11: mod_base = OTHER; note = 2'O-methyl-uridine
  modified_base 12: mod_base = OTHER; note = 2'O-methyl-adenosine
  modified_base 13: mod_base = OTHER; note = 2'O-methyl-adenosine
  modified_base 14: mod_base = OTHER; note = 2' Fluoro-uridine
  modified_base 15: mod_base = OTHER; note = 2'O-methyl-cytidine
  modified_base 16: mod_base = OTHER; note = 2' Fluoro-uridine
  modified_base 17: mod_base = OTHER; note = 2'O-methyl-cytidine
  modified_base 18: mod_base = OTHER; note = 2'O-methyl-adenosine
  modified_base 19: mod_base = OTHER; note = 2'O-methyl-uridine
  modified_base 20: mod_base = OTHER; note = 2'O-methyl-cytidine
  modified_base 21: mod_base = OTHER; note = 2'O-methyl-adenosine
  modified_base 22: mod_base = OTHER; note = 2'O-methyl-adenosine
  modified_base 23: mod_base = OTHER; note = 2'O-methyl-adenosine
  modified_base 1..2: mod_base = OTHER; note = phosphorothioate linkage
  modified_base 2..3: mod_base = OTHER; note = phosphorothioate linkage
  modified_base 21..22: mod_base = OTHER; note = phosphorothioate linkage
  modified_base 22..23: mod_base = OTHER; note = phosphorothioate linkage
  source 1..23: mol_type = other RNA
gtttcaggattaatctcatcaaa

SEQ ID NO: 231 - RNA, 23 nt, synthetic construct
  misc_feature 1..23: note = Description of origin: ZPI siRNA antisense strands
  misc_feature 1..23: note = Description of source:Antisense strand ID:
  modified_base 1: mod_base = OTHER; note = 2'O-methyl-uridine
  modified_base 2: mod_base = OTHER; note = 2' Fluoro-guanosine
  modified_base 3: mod_base = OTHER; note = 2'O-methyl-guanosine
  modified_base 4: mod_base = OTHER; note = 2' Fluoro-uridine
  modified_base 5: mod_base = OTHER; note = 2'O-methyl-uridine
  modified_base 6: mod_base = OTHER; note = 2' Fluoro-uridine
  modified_base 7: mod_base = OTHER; note = 2'O-methyl-cytidine
  modified_base 8: mod_base = OTHER; note = 2'Fluoro-adenosine
  modified_base 9: mod_base = OTHER; note = 2' Fluoro-guanosine
  modified_base 10: mod_base = OTHER; note = 2'O-methyl-guanosine
  modified_base 11: mod_base = OTHER; note = 2'O-methyl-adenosine
  modified_base 12: mod_base = OTHER; note = 2'O-methyl-uridine
  modified_base 13: mod_base = OTHER; note = 2'O-methyl-uridine
  modified_base 14: mod_base = OTHER; note = 2'Fluoro-adenosine
  modified_base 15: mod_base = OTHER; note = 2'O-methyl-adenosine
  modified_base 16: mod_base = OTHER; note = 2' Fluoro-uridine
  modified_base 17: mod_base = OTHER; note = 2'O-methyl-cytidine
  modified_base 18: mod_base = OTHER; note = 2'O-methyl-uridine
  modified_base 19: mod_base = OTHER; note = 2'O-methyl-cytidine
  modified_base 20: mod_base = OTHER; note = 2'O-methyl-adenosine
  modified_base 21: mod_base = OTHER; note = 2'O-methyl-uridine
  modified_base 22: mod_base = OTHER; note = 2'O-methyl-cytidine
  modified_base 23: mod_base = OTHER; note = 2'O-methyl-adenosine
  modified_base 1..2: mod_base = OTHER; note = phosphorothioate linkage
  modified_base 2..3: mod_base = OTHER; note = phosphorothioate linkage
  modified_base 21..22: mod_base = OTHER; note = phosphorothioate linkage
  modified_base 22..23: mod_base = OTHER; note = phosphorothioate linkage
  source 1..23: mol_type = other RNA
tggtttcaggattaatctcatca

SEQ ID NO: 232 - RNA, 23 nt, synthetic construct
  misc_feature 1..23: note = Description of origin: ZPI siRNA antisense strands
  misc_feature 1..23: note = Description of source:Antisense strand ID:
  modified_base 1: mod_base = OTHER; note = 2'O-methyl-guanosine
  modified_base 2: mod_base = OTHER; note = 2' Fluoro-guanosine
  modified_base 3: mod_base = OTHER; note = 2'O-methyl-uridine
  modified_base 4: mod_base = OTHER; note = 2' Fluoro-uridine
  modified_base 5: mod_base = OTHER; note = 2'O-methyl-uridine
  modified_base 6: mod_base = OTHER; note = 2' Fluoro-cytidine
  modified_base 7: mod_base = OTHER; note = 2'O-methyl-adenosine
  modified_base 8: mod_base = OTHER; note = 2' Fluoro-guanosine
  modified_base 9: mod_base = OTHER; note = 2' Fluoro-guanosine
  modified_base 10: mod_base = OTHER; note = 2'O-methyl-adenosine
  modified_base 11: mod_base = OTHER; note = 2'O-methyl-uridine
  modified_base 12: mod_base = OTHER; note = 2'O-methyl-uridine
  modified_base 13: mod_base = OTHER; note = 2'O-methyl-adenosine
  modified_base 14: mod_base = OTHER; note = 2'Fluoro-adenosine
  modified_base 15: mod_base = OTHER; note = 2'O-methyl-uridine
  modified_base 16: mod_base = OTHER; note = 2' Fluoro-cytidine
  modified_base 17: mod_base = OTHER; note = 2'O-methyl-uridine
  modified_base 18: mod_base = OTHER; note = 2'O-methyl-cytidine
  modified_base 19: mod_base = OTHER; note = 2'O-methyl-adenosine
  modified_base 20: mod_base = OTHER; note = 2'O-methyl-uridine
  modified_base 21: mod_base = OTHER; note = 2'O-methyl-cytidine
  modified_base 22: mod_base = OTHER; note = 2'O-methyl-adenosine
  modified_base 23: mod_base = OTHER; note = 2'O-methyl-adenosine
  modified_base 1..2: mod_base = OTHER; note = phosphorothioate linkage
  modified_base 2..3: mod_base = OTHER; note = phosphorothioate linkage
  modified_base 21..22: mod_base = OTHER; note = phosphorothioate linkage
  modified_base 22..23: mod_base = OTHER; note = phosphorothioate linkage
  source 1..23: mol_type = other RNA
ggtttcaggattaatctcatcaa

SEQ ID NO: 233 - RNA, 23 nt, synthetic construct
  misc_feature 1..23: note = Description of origin: ZPI siRNA antisense strands
  misc_feature 1..23: note = Description of source:Antisense strand ID:
  modified_base 1: mod_base = OTHER; note = 2'O-methyl-adenosine
  modified_base 2: mod_base = OTHER; note = 2' Fluoro-guanosine
  modified_base 3: mod_base = OTHER; note = 2'O-methyl-guanosine
  modified_base 4: mod_base = OTHER; note = 2'Fluoro-adenosine
  modified_base 5: mod_base = OTHER; note = 2'O-methyl-uridine
  modified_base 6: mod_base = OTHER; note = 2' Fluoro-uridine
  modified_base 7: mod_base = OTHER; note = 2'O-methyl-adenosine
  modified_base 8: mod_base = OTHER; note = 2'Fluoro-adenosine
  modified_base 9: mod_base = OTHER; note = 2' Fluoro-uridine
  modified_base 10: mod_base = OTHER; note = 2'O-methyl-cytidine
  modified_base 11: mod_base = OTHER; note = 2'O-methyl-uridine
  modified_base 12: mod_base = OTHER; note = 2'O-methyl-cytidine
  modified_base 13: mod_base = OTHER; note = 2'O-methyl-adenosine
  modified_base 14: mod_base = OTHER; note = 2' Fluoro-uridine
  modified_base 15: mod_base = OTHER; note = 2'O-methyl-cytidine
  modified_base 16: mod_base = OTHER; note = 2'Fluoro-adenosine
  modified_base 17: mod_base = OTHER; note = 2'O-methyl-adenosine
  modified_base 18: mod_base = OTHER; note = 2'O-methyl-adenosine
  modified_base 19: mod_base = OTHER; note = 2'O-methyl-cytidine
  modified_base 20: mod_base = OTHER; note = 2'O-methyl-adenosine
  modified_base 21: mod_base = OTHER; note = 2'O-methyl-guanosine
  modified_base 22: mod_base = OTHER; note = 2'O-methyl-uridine
  modified_base 23: mod_base = OTHER; note = 2'O-methyl-uridine
  modified_base 1..2: mod_base = OTHER; note = phosphorothioate linkage
  modified_base 2..3: mod_base = OTHER; note = phosphorothioate linkage
  modified_base 21..22: mod_base = OTHER; note = phosphorothioate linkage
  modified_base 22..23: mod_base = OTHER; note = phosphorothioate linkage
  source 1..23: mol_type = other RNA
aggattaatctcatcaaacagtt

SEQ ID NO: 234 - RNA, 23 nt, synthetic construct
  misc_feature 1..23: note = Description of origin: ZPI siRNA antisense strands
  misc_feature 1..23: note = Description of source:Antisense strand ID:
  modified_base 1: mod_base = OTHER; note = 2'O-methyl-uridine
  modified_base 2: mod_base = OTHER; note = 2' Fluoro-cytidine
  modified_base 3: mod_base = OTHER; note = 2'O-methyl-cytidine
  modified_base 4: mod_base = OTHER; note = 2' Fluoro-uridine
  modified_base 5: mod_base = OTHER; note = 2'O-methyl-uridine
  modified_base 6: mod_base = OTHER; note = 2' Fluoro-guanosine
  modified_base 7: mod_base = OTHER; note = 2'O-methyl-uridine
  modified_base 8: mod_base = OTHER; note = 2' Fluoro-guanosine
  modified_base 9: mod_base = OTHER; note = 2' Fluoro-guanosine
  modified_base 10: mod_base = OTHER; note = 2'O-methyl-adenosine
  modified_base 11: mod_base = OTHER; note = 2'O-methyl-uridine
  modified_base 12: mod_base = OTHER; note = 2'O-methyl-guanosine
  modified_base 13: mod_base = OTHER; note = 2'O-methyl-adenosine
  modified_base 14: mod_base = OTHER; note = 2'Fluoro-adenosine
  modified_base 15: mod_base = OTHER; note = 2'O-methyl-guanosine
  modified_base 16: mod_base = OTHER; note = 2' Fluoro-guanosine
  modified_base 17: mod_base = OTHER; note = 2'O-methyl-cytidine
  modified_base 18: mod_base = OTHER; note = 2'O-methyl-adenosine
  modified_base 19: mod_base = OTHER; note = 2'O-methyl-adenosine
  modified_base 20: mod_base = OTHER; note = 2'O-methyl-adenosine
  modified_base 21: mod_base = OTHER; note = 2'O-methyl-adenosine
  modified_base 22: mod_base = OTHER; note = 2'O-methyl-cytidine
  modified_base 23: mod_base = OTHER; note = 2'O-methyl-uridine
  modified_base 1..2: mod_base = OTHER; note = phosphorothioate linkage
  modified_base 2..3: mod_base = OTHER; note = phosphorothioate linkage
  modified_base 21..22: mod_base = OTHER; note = phosphorothioate linkage
  modified_base 22..23: mod_base = OTHER; note = phosphorothioate linkage
  source 1..23: mol_type = other RNA
tccttgtggatgaaggcaaaact

SEQ ID NO: 235 - RNA, 23 nt, synthetic construct
  misc_feature 1..23: note = Description of origin: ZPI siRNA antisense strands
  misc_feature 1..23: note = Description of source:Antisense strand ID:
  modified_base 1: mod_base = OTHER; note = 2'O-methyl-guanosine
  modified_base 2: mod_base = OTHER; note = 2' Fluoro-uridine
  modified_base 3: mod_base = OTHER; note = 2'O-methyl-guanosine
  modified_base 4: mod_base = OTHER; note = 2' Fluoro-cytidine
  modified_base 5: mod_base = OTHER; note = 2'O-methyl-cytidine
  modified_base 6: mod_base = OTHER; note = 2' Fluoro-uridine
  modified_base 7: mod_base = OTHER; note = 2'O-methyl-cytidine
  modified_base 8: mod_base = OTHER; note = 2'Fluoro-adenosine
  modified_base 9: mod_base = OTHER; note = 2' Fluoro-uridine
  modified_base 10: mod_base = OTHER; note = 2'O-methyl-guanosine
  modified_base 11: mod_base = OTHER; note = 2'O-methyl-guanosine
  modified_base 12: mod_base = OTHER; note = 2'O-methyl-adenosine
  modified_base 13: mod_base = OTHER; note = 2'O-methyl-guanosine
  modified_base 14: mod_base = OTHER; note = 2'Fluoro-adenosine
  modified_base 15: mod_base = OTHER; note = 2'O-methyl-uridine
  modified_base 16: mod_base = OTHER; note = 2' Fluoro-cytidine
  modified_base 17: mod_base = OTHER; note = 2'O-methyl-uridine
  modified_base 18: mod_base = OTHER; note = 2'O-methyl-uridine
  modified_base 19: mod_base = OTHER; note = 2'O-methyl-uridine
  modified_base 20: mod_base = OTHER; note = 2'O-methyl-cytidine
  modified_base 21: mod_base = OTHER; note = 2'O-methyl-guanosine
  modified_base 22: mod_base = OTHER; note = 2'O-methyl-cytidine
  modified_base 23: mod_base = OTHER; note = 2'O-methyl-adenosine
  modified_base 1..2: mod_base = OTHER; note = phosphorothioate linkage
  modified_base 2..3: mod_base = OTHER; note = phosphorothioate linkage
  modified_base 21..22: mod_base = OTHER; note = phosphorothioate linkage
  modified_base 22..23: mod_base = OTHER; note = phosphorothioate linkage
  source 1..23: mol_type = other RNA
gtgcctcatggagatctttcgca

SEQ ID NO: 236 - RNA, 23 nt, synthetic construct
  misc_feature 1..23: note = Description of origin: ZPI siRNA antisense strands
  misc_feature 1..23: note = Description of source:Antisense strand ID:
  modified_base 1: mod_base = OTHER; note = 2'O-methyl-uridine
  modified_base 2: mod_base = OTHER; note = 2' Fluoro-cytidine
  modified_base 3: mod_base = OTHER; note = 2'O-methyl-uridine
  modified_base 4: mod_base = OTHER; note = 2' Fluoro-cytidine
  modified_base 5: mod_base = OTHER; note = 2'O-methyl-cytidine
  modified_base 6: mod_base = OTHER; note = 2'Fluoro-adenosine
  modified_base 7: mod_base = OTHER; note = 2'O-methyl-uridine
  modified_base 8: mod_base = OTHER; note = 2' Fluoro-guanosine
  modified_base 9: mod_base = OTHER; note = 2'Fluoro-adenosine
  modified_base 10: mod_base = OTHER; note = 2'O-methyl-guanosine
  modified_base 11: mod_base = OTHER; note = 2'O-methyl-guanosine
  modified_base 12: mod_base = OTHER; note = 2'O-methyl-adenosine
  modified_base 13: mod_base = OTHER; note = 2'O-methyl-cytidine
  modified_base 14: mod_base = OTHER; note = 2' Fluoro-cytidine
  modified_base 15: mod_base = OTHER; note = 2'O-methyl-adenosine
  modified_base 16: mod_base = OTHER; note = 2' Fluoro-cytidine
  modified_base 17: mod_base = OTHER; note = 2'O-methyl-cytidine
  modified_base 18: mod_base = OTHER; note = 2'O-methyl-adenosine
  modified_base 19: mod_base = OTHER; note = 2'O-methyl-guanosine
  modified_base 20: mod_base = OTHER; note = 2'O-methyl-cytidine
  modified_base 21: mod_base = OTHER; note = 2'O-methyl-adenosine
  modified_base 22: mod_base = OTHER; note = 2'O-methyl-uridine
  modified_base 23: mod_base = OTHER; note = 2'O-methyl-guanosine
  modified_base 1..2: mod_base = OTHER; note = phosphorothioate linkage
  modified_base 2..3: mod_base = OTHER; note = phosphorothioate linkage
  modified_base 21..22: mod_base = OTHER; note = phosphorothioate linkage
  modified_base 22..23: mod_base = OTHER; note = phosphorothioate linkage
  source 1..23: mol_type = other RNA
tctccatgaggaccaccagcatg

SEQ ID NO: 237 - RNA, 23 nt, synthetic construct
  misc_feature 1..23: note = Description of origin: ZPI siRNA antisense strands
  misc_feature 1..23: note = Description of source:Antisense strand ID:
  modified_base 1: mod_base = OTHER; note = 2'O-methyl-cytidine
  modified_base 2: mod_base = OTHER; note = 2'Fluoro-adenosine
  modified_base 3: mod_base = OTHER; note = 2'O-methyl-adenosine
  modified_base 4: mod_base = OTHER; note = 2'Fluoro-adenosine
  modified_base 5: mod_base = OTHER; note = 2'O-methyl-adenosine
  modified_base 6: mod_base = OTHER; note = 2' Fluoro-uridine
  modified_base 7: mod_base = OTHER; note = 2'O-methyl-cytidine
  modified_base 8: mod_base = OTHER; note = 2' Fluoro-cytidine
  modified_base 9: mod_base = OTHER; note = 2' Fluoro-uridine
  modified_base 10: mod_base = OTHER; note = 2'O-methyl-uridine
  modified_base 11: mod_base = OTHER; note = 2'O-methyl-guanosine
  modified_base 12: mod_base = OTHER; note = 2'O-methyl-uridine
  modified_base 13: mod_base = OTHER; note = 2'O-methyl-guanosine
  modified_base 14: mod_base = OTHER; note = 2' Fluoro-guanosine
  modified_base 15: mod_base = OTHER; note = 2'O-methyl-adenosine
  modified_base 16: mod_base = OTHER; note = 2' Fluoro-uridine
  modified_base 17: mod_base = OTHER; note = 2'O-methyl-guanosine
  modified_base 18: mod_base = OTHER; note = 2'O-methyl-adenosine
  modified_base 19: mod_base = OTHER; note = 2'O-methyl-adenosine
  modified_base 20: mod_base = OTHER; note = 2'O-methyl-guanosine
  modified_base 21: mod_base = OTHER; note = 2'O-methyl-guanosine
  modified_base 22: mod_base = OTHER; note = 2'O-methyl-cytidine
  modified_base 23: mod_base = OTHER; note = 2'O-methyl-adenosine
  modified_base 1..2: mod_base = OTHER; note = phosphorothioate linkage
  modified_base 2..3: mod_base = OTHER; note = phosphorothioate linkage
  modified_base 21..22: mod_base = OTHER; note = phosphorothioate linkage
  modified_base 22..23: mod_base = OTHER; note = phosphorothioate linkage
  source 1..23: mol_type = other RNA
caaaatccttgtggatgaaggca

SEQ ID NO: 238 - RNA, 23 nt, synthetic construct
  misc_feature 1..23: note = Description of origin: ZPI siRNA antisense strands
  misc_feature 1..23: note = Description of source:Antisense strand ID:
  modified_base 1: mod_base = OTHER; note = 2'O-methyl-cytidine
  modified_base 2: mod_base = OTHER; note = 2' Fluoro-guanosine
  modified_base 3: mod_base = OTHER; note = 2'O-methyl-uridine
  modified_base 4: mod_base = OTHER; note = 2' Fluoro-guanosine
  modified_base 5: mod_base = OTHER; note = 2'O-methyl-cytidine
  modified_base 6: mod_base = OTHER; note = 2' Fluoro-cytidine
  modified_base 7: mod_base = OTHER; note = 2'O-methyl-uridine
  modified_base 8: mod_base = OTHER; note = 2' Fluoro-cytidine
  modified_base 9: mod_base = OTHER; note = 2'Fluoro-adenosine
  modified_base 10: mod_base = OTHER; note = 2'O-methyl-uridine
  modified_base 11: mod_base = OTHER; note = 2'O-methyl-guanosine
  modified_base 12: mod_base = OTHER; note = 2'O-methyl-guanosine
  modified_base 13: mod_base = OTHER; note = 2'O-methyl-adenosine
  modified_base 14: mod_base = OTHER; note = 2' Fluoro-guanosine
  modified_base 15: mod_base = OTHER; note = 2'O-methyl-adenosine
  modified_base 16: mod_base = OTHER; note = 2' Fluoro-uridine
  modified_base 17: mod_base = OTHER; note = 2'O-methyl-cytidine
  modified_base 18: mod_base = OTHER; note = 2'O-methyl-uridine
  modified_base 19: mod_base = OTHER; note = 2'O-methyl-uridine
  modified_base 20: mod_base = OTHER; note = 2'O-methyl-uridine
  modified_base 21: mod_base = OTHER; note = 2'O-methyl-cytidine
  modified_base 22: mod_base = OTHER; note = 2'O-methyl-guanosine
  modified_base 23: mod_base = OTHER; note = 2'O-methyl-cytidine
  modified_base 1..2: mod_base = OTHER; note = phosphorothioate linkage
  modified_base 2..3: mod_base = OTHER; note = phosphorothioate linkage
  modified_base 21..22: mod_base = OTHER; note = phosphorothioate linkage
  modified_base 22..23: mod_base = OTHER; note = phosphorothioate linkage
  source 1..23: mol_type = other RNA
cgtgcctcatggagatctttcgc

SEQ ID NO: 239 - RNA, 23 nt, synthetic construct
  misc_feature 1..23: note = Description of origin: ZPI siRNA antisense strands
  misc_feature 1..23: note = Description of source:Antisense strand ID:
  modified_base 1: mod_base = OTHER; note = 2'O-methyl-adenosine
  modified_base 2: mod_base = OTHER; note = 2' Fluoro-uridine
  modified_base 3: mod_base = OTHER; note = 2'O-methyl-cytidine
  modified_base 4: mod_base = OTHER; note = 2'Fluoro-adenosine
  modified_base 5: mod_base = OTHER; note = 2'O-methyl-adenosine
  modified_base 6: mod_base = OTHER; note = 2'Fluoro-adenosine
  modified_base 7: mod_base = OTHER; note = 2'O-methyl-adenosine
  modified_base 8: mod_base = OTHER; note = 2' Fluoro-uridine
  modified_base 9: mod_base = OTHER; note = 2' Fluoro-cytidine
  modified_base 10: mod_base = OTHER; note = 2'O-methyl-cytidine
  modified_base 11: mod_base = OTHER; note = 2'O-methyl-uridine
  modified_base 12: mod_base = OTHER; note = 2'O-methyl-uridine
  modified_base 13: mod_base = OTHER; note = 2'O-methyl-guanosine
  modified_base 14: mod_base = OTHER; note = 2' Fluoro-uridine
  modified_base 15: mod_base = OTHER; note = 2'O-methyl-guanosine
  modified_base 16: mod_base = OTHER; note = 2' Fluoro-guanosine
  modified_base 17: mod_base = OTHER; note = 2'O-methyl-adenosine
  modified_base 18: mod_base = OTHER; note = 2'O-methyl-uridine
  modified_base 19: mod_base = OTHER; note = 2'O-methyl-guanosine
  modified_base 20: mod_base = OTHER; note = 2'O-methyl-adenosine
  modified_base 21: mod_base = OTHER; note = 2'O-methyl-adenosine
  modified_base 22: mod_base = OTHER; note = 2'O-methyl-guanosine
  modified_base 23: mod_base = OTHER; note = 2'O-methyl-guanosine
  modified_base 1..2: mod_base = OTHER; note = phosphorothioate linkage
  modified_base 2..3: mod_base = OTHER; note = phosphorothioate linkage
  modified_base 21..22: mod_base = OTHER; note = phosphorothioate linkage
  modified_base 22..23: mod_base = OTHER; note = phosphorothioate linkage
  source 1..23: mol_type = other RNA
atcaaaatccttgtggatgaagg

SEQ ID NO: 240 - RNA, 23 nt, synthetic construct
  misc_feature 1..23: note = Description of origin: ZPI siRNA antisense strands
  misc_feature 1..23: note = Description of source:Antisense strand ID:
  modified_base 1: mod_base = OTHER; note = 2'O-methyl-uridine
  modified_base 2: mod_base = OTHER; note = 2' Fluoro-uridine
  modified_base 3: mod_base = OTHER; note = 2'O-methyl-cytidine
  modified_base 4: mod_base = OTHER; note = 2'Fluoro-adenosine
  modified_base 5: mod_base = OTHER; note = 2'O-methyl-guanosine
  modified_base 6: mod_base = OTHER; note = 2' Fluoro-guanosine
  modified_base 7: mod_base = OTHER; note = 2'O-methyl-adenosine
  modified_base 8: mod_base = OTHER; note = 2' Fluoro-uridine
  modified_base 9: mod_base = OTHER; note = 2' Fluoro-uridine
  modified_base 10: mod_base = OTHER; note = 2'O-methyl-adenosine
  modified_base 11: mod_base = OTHER; note = 2'O-methyl-adenosine
  modified_base 12: mod_base = OTHER; note = 2'O-methyl-uridine
  modified_base 13: mod_base = OTHER; note = 2'O-methyl-cytidine
  modified_base 14: mod_base = OTHER; note = 2' Fluoro-uridine
  modified_base 15: mod_base = OTHER; note = 2'O-methyl-cytidine
  modified_base 16: mod_base = OTHER; note = 2'Fluoro-adenosine
  modified_base 17: mod_base = OTHER; note = 2'O-methyl-uridine
  modified_base 18: mod_base = OTHER; note = 2'O-methyl-cytidine
  modified_base 19: mod_base = OTHER; note = 2'O-methyl-adenosine
  modified_base 20: mod_base = OTHER; note = 2'O-methyl-adenosine
  modified_base 21: mod_base = OTHER; note = 2'O-methyl-adenosine
  modified_base 22: mod_base = OTHER; note = 2'O-methyl-cytidine
  modified_base 23: mod_base = OTHER; note = 2'O-methyl-adenosine
  modified_base 1..2: mod_base = OTHER; note = phosphorothioate linkage
  modified_base 2..3: mod_base = OTHER; note = phosphorothioate linkage
  modified_base 21..22: mod_base = OTHER; note = phosphorothioate linkage
  modified_base 22..23: mod_base = OTHER; note = phosphorothioate linkage
  source 1..23: mol_type = other RNA
ttcaggattaatctcatcaaaca

SEQ ID NO: 241 - RNA, 23 nt, synthetic construct
  misc_feature 1..23: note = Description of origin: ZPI siRNA antisense strands
  misc_feature 1..23: note = Description of source:Antisense strand ID:
  modified_base 1: mod_base = OTHER; note = 2'O-methyl-adenosine
  modified_base 2: mod_base = OTHER; note = 2'Fluoro-adenosine
  modified_base 3: mod_base = OTHER; note = 2'O-methyl-uridine
  modified_base 4: mod_base = OTHER; note = 2' Fluoro-cytidine
  modified_base 5: mod_base = OTHER; note = 2'O-methyl-cytidine
  modified_base 6: mod_base = OTHER; note = 2' Fluoro-uridine
  modified_base 7: mod_base = OTHER; note = 2'O-methyl-uridine
  modified_base 8: mod_base = OTHER; note = 2' Fluoro-guanosine
  modified_base 9: mod_base = OTHER; note = 2' Fluoro-uridine
  modified_base 10: mod_base = OTHER; note = 2'O-methyl-guanosine
  modified_base 11: mod_base = OTHER; note = 2'O-methyl-guanosine
  modified_base 12: mod_base = OTHER; note = 2'O-methyl-adenosine
  modified_base 13: mod_base = OTHER; note = 2'O-methyl-uridine
  modified_base 14: mod_base = OTHER; note = 2' Fluoro-guanosine
  modified_base 15: mod_base = OTHER; note = 2'O-methyl-adenosine
  modified_base 16: mod_base = OTHER; note = 2'Fluoro-adenosine
  modified_base 17: mod_base = OTHER; note = 2'O-methyl-guanosine
  modified_base 18: mod_base = OTHER; note = 2'O-methyl-guanosine
  modified_base 19: mod_base = OTHER; note = 2'O-methyl-cytidine
  modified_base 20: mod_base = OTHER; note = 2'O-methyl-adenosine
  modified_base 21: mod_base = OTHER; note = 2'O-methyl-adenosine
  modified_base 22: mod_base = OTHER; note = 2'O-methyl-adenosine
  modified_base 23: mod_base = OTHER; note = 2'O-methyl-adenosine
  modified_base 1..2: mod_base = OTHER; note = phosphorothioate linkage
  modified_base 2..3: mod_base = OTHER; note = phosphorothioate linkage
  modified_base 21..22: mod_base = OTHER; note = phosphorothioate linkage
  modified_base 22..23: mod_base = OTHER; note = phosphorothioate linkage
  source 1..23: mol_type = other RNA
aatccttgtggatgaaggcaaaa

SEQ ID NO: 242 - RNA, 23 nt, synthetic construct
  misc_feature 1..23: note = Description of origin: ZPI siRNA antisense strands
  misc_feature 1..23: note = Description of source:Antisense strand ID:
  modified_base 1: mod_base = OTHER; note = 2'O-methyl-cytidine
  modified_base 2: mod_base = OTHER; note = 2' Fluoro-cytidine
  modified_base 3: mod_base = OTHER; note = 2'O-methyl-adenosine
  modified_base 4: mod_base = OTHER; note = 2' Fluoro-uridine
  modified_base 5: mod_base = OTHER; note = 2'O-methyl-cytidine
  modified_base 6: mod_base = OTHER; note = 2' Fluoro-guanosine
  modified_base 7: mod_base = OTHER; note = 2'O-methyl-uridine
  modified_base 8: mod_base = OTHER; note = 2' Fluoro-guanosine
  modified_base 9: mod_base = OTHER; note = 2' Fluoro-cytidine
  modified_base 10: mod_base = OTHER; note = 2'O-methyl-cytidine
  modified_base 11: mod_base = OTHER; note = 2'O-methyl-uridine
  modified_base 12: mod_base = OTHER; note = 2'O-methyl-cytidine
  modified_base 13: mod_base = OTHER; note = 2'O-methyl-adenosine
  modified_base 14: mod_base = OTHER; note = 2' Fluoro-uridine
  modified_base 15: mod_base = OTHER; note = 2'O-methyl-guanosine
  modified_base 16: mod_base = OTHER; note = 2' Fluoro-guanosine
  modified_base 17: mod_base = OTHER; note = 2'O-methyl-adenosine
  modified_base 18: mod_base = OTHER; note = 2'O-methyl-guanosine
  modified_base 19: mod_base = OTHER; note = 2'O-methyl-adenosine
  modified_base 20: mod_base = OTHER; note = 2'O-methyl-uridine
  modified_base 21: mod_base = OTHER; note = 2'O-methyl-cytidine
  modified_base 22: mod_base = OTHER; note = 2'O-methyl-uridine
  modified_base 23: mod_base = OTHER; note = 2'O-methyl-uridine
  modified_base 1..2: mod_base = OTHER; note = phosphorothioate linkage
  modified_base 2..3: mod_base = OTHER; note = phosphorothioate linkage
  modified_base 21..22: mod_base = OTHER; note = phosphorothioate linkage
  modified_base 22..23: mod_base = OTHER; note = phosphorothioate linkage
  source 1..23: mol_type = other RNA
ccatcgtgcctcatggagatctt

SEQ ID NO: 243 - RNA, 23 nt, synthetic construct
  misc_feature 1..23: note = Description of origin: ZPI siRNA antisense strands
  misc_feature 1..23: note = Description of source:Antisense strand ID:
  modified_base 1: mod_base = OTHER; note = 2'O-methyl-adenosine
  modified_base 2: mod_base = OTHER; note = 2'Fluoro-adenosine
  modified_base 3: mod_base = OTHER; note = 2'O-methyl-adenosine
  modified_base 4: mod_base = OTHER; note = 2' Fluoro-uridine
  modified_base 5: mod_base = OTHER; note = 2'O-methyl-cytidine
  modified_base 6: mod_base = OTHER; note = 2' Fluoro-cytidine
  modified_base 7: mod_base = OTHER; note = 2'O-methyl-uridine
  modified_base 8: mod_base = OTHER; note = 2' Fluoro-uridine
  modified_base 9: mod_base = OTHER; note = 2' Fluoro-guanosine
  modified_base 10: mod_base = OTHER; note = 2'O-methyl-uridine
  modified_base 11: mod_base = OTHER; note = 2'O-methyl-guanosine
  modified_base 12: mod_base = OTHER; note = 2'O-methyl-guanosine
  modified_base 13: mod_base = OTHER; note = 2'O-methyl-adenosine
  modified_base 14: mod_base = OTHER; note = 2' Fluoro-uridine
  modified_base 15: mod_base = OTHER; note = 2'O-methyl-guanosine
  modified_base 16: mod_base = OTHER; note = 2'Fluoro-adenosine
  modified_base 17: mod_base = OTHER; note = 2'O-methyl-adenosine
  modified_base 18: mod_base = OTHER; note = 2'O-methyl-guanosine
  modified_base 19: mod_base = OTHER; note = 2'O-methyl-guanosine
  modified_base 20: mod_base = OTHER; note = 2'O-methyl-cytidine
  modified_base 21: mod_base = OTHER; note = 2'O-methyl-adenosine
  modified_base 22: mod_base = OTHER; note = 2'O-methyl-adenosine
  modified_base 23: mod_base = OTHER; note = 2'O-methyl-adenosine
  modified_base 1..2: mod_base = OTHER; note = phosphorothioate linkage
  modified_base 2..3: mod_base = OTHER; note = phosphorothioate linkage
  modified_base 21..22: mod_base = OTHER; note = phosphorothioate linkage
  modified_base 22..23: mod_base = OTHER; note = phosphorothioate linkage
  source 1..23: mol_type = other RNA
aaatccttgtggatgaaggcaaa

SEQ ID NO: 244 - RNA, 23 nt, synthetic construct
  misc_feature 1..23: note = Description of origin: ZPI siRNA antisense strands
  misc_feature 1..23: note = Description of source:Antisense strand ID:
  modified_base 1: mod_base = OTHER; note = 2'O-methyl-guanosine
  modified_base 2: mod_base = OTHER; note = 2' Fluoro-cytidine
  modified_base 3: mod_base = OTHER; note = 2'O-methyl-cytidine
  modified_base 4: mod_base = OTHER; note = 2' Fluoro-uridine
  modified_base 5: mod_base = OTHER; note = 2'O-methyl-cytidine
  modified_base 6: mod_base = OTHER; note = 2'Fluoro-adenosine
  modified_base 7: mod_base = OTHER; note = 2'O-methyl-uridine
  modified_base 8: mod_base = OTHER; note = 2' Fluoro-guanosine
  modified_base 9: mod_base = OTHER; note = 2' Fluoro-guanosine
  modified_base 10: mod_base = OTHER; note = 2'O-methyl-adenosine
  modified_base 11: mod_base = OTHER; note = 2'O-methyl-guanosine
  modified_base 12: mod_base = OTHER; note = 2'O-methyl-adenosine
  modified_base 13: mod_base = OTHER; note = 2'O-methyl-uridine
  modified_base 14: mod_base = OTHER; note = 2' Fluoro-cytidine
  modified_base 15: mod_base = OTHER; note = 2'O-methyl-uridine
  modified_base 16: mod_base = OTHER; note = 2' Fluoro-uridine
  modified_base 17: mod_base = OTHER; note = 2'O-methyl-uridine
  modified_base 18: mod_base = OTHER; note = 2'O-methyl-cytidine
  modified_base 19: mod_base = OTHER; note = 2'O-methyl-guanosine
  modified_base 20: mod_base = OTHER; note = 2'O-methyl-cytidine
  modified_base 21: mod_base = OTHER; note = 2'O-methyl-adenosine
  modified_base 22: mod_base = OTHER; note = 2'O-methyl-guanosine
  modified_base 23: mod_base = OTHER; note = 2'O-methyl-cytidine
  modified_base 1..2: mod_base = OTHER; note = phosphorothioate linkage
  modified_base 2..3: mod_base = OTHER; note = phosphorothioate linkage
  modified_base 21..22: mod_base = OTHER; note = phosphorothioate linkage
  modified_base 22..23: mod_base = OTHER; note = phosphorothioate linkage
  source 1..23: mol_type = other RNA
gcctcatggagatctttcgcagc

SEQ ID NO: 245 - RNA, 23 nt, synthetic construct
  misc_feature 1..23: note = Description of origin: ZPI siRNA antisense strands
  misc_feature 1..23: note = Description of source:Antisense strand ID:
  modified_base 1: mod_base = OTHER; note = 2'O-methyl-uridine
  modified_base 2: mod_base = OTHER; note = 2' Fluoro-uridine
  modified_base 3: mod_base = OTHER; note = 2'O-methyl-cytidine
  modified_base 4: mod_base = OTHER; note = 2' Fluoro-uridine
  modified_base 5: mod_base = OTHER; note = 2'O-methyl-cytidine
  modified_base 6: mod_base = OTHER; note = 2' Fluoro-cytidine
  modified_base 7: mod_base = OTHER; note = 2'O-methyl-adenosine
  modified_base 8: mod_base = OTHER; note = 2' Fluoro-uridine
  modified_base 9: mod_base = OTHER; note = 2' Fluoro-guanosine
  modified_base 10: mod_base = OTHER; note = 2'O-methyl-adenosine
  modified_base 11: mod_base = OTHER; note = 2'O-methyl-guanosine
  modified_base 12: mod_base = OTHER; note = 2'O-methyl-guanosine
  modified_base 13: mod_base = OTHER; note = 2'O-methyl-adenosine
  modified_base 14: mod_base = OTHER; note = 2' Fluoro-cytidine
  modified_base 15: mod_base = OTHER; note = 2'O-methyl-cytidine
  modified_base 16: mod_base = OTHER; note = 2'Fluoro-adenosine
  modified_base 17: mod_base = OTHER; note = 2'O-methyl-cytidine
  modified_base 18: mod_base = OTHER; note = 2'O-methyl-cytidine
  modified_base 19: mod_base = OTHER; note = 2'O-methyl-adenosine
  modified_base 20: mod_base = OTHER; note = 2'O-methyl-guanosine
  modified_base 21: mod_base = OTHER; note = 2'O-methyl-cytidine
  modified_base 22: mod_base = OTHER; note = 2'O-methyl-adenosine
  modified_base 23: mod_base = OTHER; note = 2'O-methyl-uridine
  modified_base 1..2: mod_base = OTHER; note = phosphorothioate linkage
  modified_base 2..3: mod_base = OTHER; note = phosphorothioate linkage
  modified_base 21..22: mod_base = OTHER; note = phosphorothioate linkage
  modified_base 22..23: mod_base = OTHER; note = phosphorothioate linkage
  source 1..23: mol_type = other RNA
ttctccatgaggaccaccagcat

SEQ ID NO: 246 - RNA, 23 nt, synthetic construct
  misc_feature 1..23: note = Description of origin: ZPI siRNA antisense strands
  misc_feature 1..23: note = Description of source:Antisense strand ID:
  modified_base 1: mod_base = OTHER; note = 2'O-methyl-uridine
  modified_base 2: mod_base = OTHER; note = 2' Fluoro-guanosine
  modified_base 3: mod_base = OTHER; note = 2'O-methyl-cytidine
  modified_base 4: mod_base = OTHER; note = 2' Fluoro-cytidine
  modified_base 5: mod_base = OTHER; note = 2'O-methyl-uridine
  modified_base 6: mod_base = OTHER; note = 2' Fluoro-cytidine
  modified_base 7: mod_base = OTHER; note = 2'O-methyl-adenosine
  modified_base 8: mod_base = OTHER; note = 2' Fluoro-uridine
  modified_base 9: mod_base = OTHER; note = 2' Fluoro-guanosine
  modified_base 10: mod_base = OTHER; note = 2'O-methyl-guanosine
  modified_base 11: mod_base = OTHER; note = 2'O-methyl-adenosine
  modified_base 12: mod_base = OTHER; note = 2'O-methyl-guanosine
  modified_base 13: mod_base = OTHER; note = 2'O-methyl-adenosine
  modified_base 14: mod_base = OTHER; note = 2' Fluoro-uridine
  modified_base 15: mod_base = OTHER; note = 2'O-methyl-cytidine
  modified_base 16: mod_base = OTHER; note = 2' Fluoro-uridine
  modified_base 17: mod_base = OTHER; note = 2'O-methyl-uridine
  modified_base 18: mod_base = OTHER; note = 2'O-methyl-uridine
  modified_base 19: mod_base = OTHER; note = 2'O-methyl-cytidine
  modified_base 20: mod_base = OTHER; note = 2'O-methyl-guanosine
  modified_base 21: mod_base = OTHER; note = 2'O-methyl-cytidine
  modified_base 22: mod_base = OTHER; note = 2'O-methyl-adenosine
  modified_base 23: mod_base = OTHER; note = 2'O-methyl-guanosine
  modified_base 1..2: mod_base = OTHER; note = phosphorothioate linkage
  modified_base 2..3: mod_base = OTHER; note = phosphorothioate linkage
  modified_base 21..22: mod_base = OTHER; note = phosphorothioate linkage
  modified_base 22..23: mod_base = OTHER; note = phosphorothioate linkage
  source 1..23: mol_type = other RNA
tgcctcatggagatctttcgcag

SEQ ID NO: 247 - RNA, 23 nt, synthetic construct
  misc_feature 1..23: note = Description of origin: ZPI siRNA antisense strands
  misc_feature 1..23: note = Description of source:Antisense strand ID:
  modified_base 1: mod_base = OTHER; note = 2'O-methyl-adenosine
  modified_base 2: mod_base = OTHER; note = 2' Fluoro-guanosine
  modified_base 3: mod_base = OTHER; note = 2'O-methyl-cytidine
  modified_base 4: mod_base = OTHER; note = 2'Fluoro-adenosine
  modified_base 5: mod_base = OTHER; note = 2'O-methyl-guanosine
  modified_base 6: mod_base = OTHER; note = 2' Fluoro-cytidine
  modified_base 7: mod_base = OTHER; note = 2'O-methyl-uridine
  modified_base 8: mod_base = OTHER; note = 2' Fluoro-cytidine
  modified_base 9: mod_base = OTHER; note = 2'Fluoro-adenosine
  modified_base 10: mod_base = OTHER; note = 2'O-methyl-uridine
  modified_base 11: mod_base = OTHER; note = 2'O-methyl-guanosine
  modified_base 12: mod_base = OTHER; note = 2'O-methyl-cytidine
  modified_base 13: mod_base = OTHER; note = 2'O-methyl-adenosine
  modified_base 14: mod_base = OTHER; note = 2' Fluoro-uridine
  modified_base 15: mod_base = OTHER; note = 2'O-methyl-cytidine
  modified_base 16: mod_base = OTHER; note = 2' Fluoro-uridine
  modified_base 17: mod_base = OTHER; note = 2'O-methyl-cytidine
  modified_base 18: mod_base = OTHER; note = 2'O-methyl-adenosine
  modified_base 19: mod_base = OTHER; note = 2'O-methyl-uridine
  modified_base 20: mod_base = OTHER; note = 2'O-methyl-adenosine
  modified_base 21: mod_base = OTHER; note = 2'O-methyl-cytidine
  modified_base 22: mod_base = OTHER; note = 2'O-methyl-uridine
  modified_base 23: mod_base = OTHER; note = 2'O-methyl-uridine
  modified_base 1..2: mod_base = OTHER; note = phosphorothioate linkage
  modified_base 2..3: mod_base = OTHER; note = phosphorothioate linkage
  modified_base 21..22: mod_base = OTHER; note = phosphorothioate linkage
  modified_base 22..23: mod_base = OTHER; note = phosphorothioate linkage
  source 1..23: mol_type = other RNA
agcagctcatgcatctcatactt

SEQ ID NO: 248 - RNA, 23 nt, synthetic construct
  misc_feature 1..23: note = Description of origin: ZPI siRNA antisense strands
  misc_feature 1..23: note = Description of source:Antisense strand ID:
  modified_base 1: mod_base = OTHER; note = 2'O-methyl-uridine
  modified_base 2: mod_base = OTHER; note = 2' Fluoro-cytidine
  modified_base 3: mod_base = OTHER; note = 2'O-methyl-adenosine
  modified_base 4: mod_base = OTHER; note = 2' Fluoro-guanosine
  modified_base 5: mod_base = OTHER; note = 2'O-methyl-guanosine
  modified_base 6: mod_base = OTHER; note = 2'Fluoro-adenosine
  modified_base 7: mod_base = OTHER; note = 2'O-methyl-uridine
  modified_base 8: mod_base = OTHER; note = 2' Fluoro-uridine
  modified_base 9: mod_base = OTHER; note = 2'Fluoro-adenosine
  modified_base 10: mod_base = OTHER; note = 2'O-methyl-adenosine
  modified_base 11: mod_base = OTHER; note = 2'O-methyl-uridine
  modified_base 12: mod_base = OTHER; note = 2'O-methyl-cytidine
  modified_base 13: mod_base = OTHER; note = 2'O-methyl-uridine
  modified_base 14: mod_base = OTHER; note = 2' Fluoro-cytidine
  modified_base 15: mod_base = OTHER; note = 2'O-methyl-adenosine
  modified_base 16: mod_base = OTHER; note = 2' Fluoro-uridine
  modified_base 17: mod_base = OTHER; note = 2'O-methyl-cytidine
  modified_base 18: mod_base = OTHER; note = 2'O-methyl-adenosine
  modified_base 19: mod_base = OTHER; note = 2'O-methyl-adenosine
  modified_base 20: mod_base = OTHER; note = 2'O-methyl-adenosine
  modified_base 21: mod_base = OTHER; note = 2'O-methyl-cytidine
  modified_base 22: mod_base = OTHER; note = 2'O-methyl-adenosine
  modified_base 23: mod_base = OTHER; note = 2'O-methyl-guanosine
  modified_base 1..2: mod_base = OTHER; note = phosphorothioate linkage
  modified_base 2..3: mod_base = OTHER; note = phosphorothioate linkage
  modified_base 21..22: mod_base = OTHER; note = phosphorothioate linkage
  modified_base 22..23: mod_base = OTHER; note = phosphorothioate linkage
  source 1..23: mol_type = other RNA
tcaggattaatctcatcaaacag

SEQ ID NO: 249 - RNA, 23 nt, synthetic construct
  misc_feature 1..23: note = Description of origin: ZPI siRNA antisense strands
  misc_feature 1..23: note = Description of source:Antisense strand ID:
  modified_base 1: mod_base = OTHER; note = 2'O-methyl-uridine
  modified_base 2: mod_base = OTHER; note = 2' Fluoro-uridine
  modified_base 3: mod_base = OTHER; note = 2'O-methyl-guanosine
  modified_base 4: mod_base = OTHER; note = 2' Fluoro-guanosine
  modified_base 5: mod_base = OTHER; note = 2'O-methyl-uridine
  modified_base 6: mod_base = OTHER; note = 2' Fluoro-uridine
  modified_base 7: mod_base = OTHER; note = 2'O-methyl-uridine
  modified_base 8: mod_base = OTHER; note = 2' Fluoro-cytidine
  modified_base 9: mod_base = OTHER; note = 2'Fluoro-adenosine
  modified_base 10: mod_base = OTHER; note = 2'O-methyl-guanosine
  modified_base 11: mod_base = OTHER; note = 2'O-methyl-guanosine
  modified_base 12: mod_base = OTHER; note = 2'O-methyl-adenosine
  modified_base 13: mod_base = OTHER; note = 2'O-methyl-uridine
  modified_base 14: mod_base = OTHER; note = 2' Fluoro-uridine
  modified_base 15: mod_base = OTHER; note = 2'O-methyl-adenosine
  modified_base 16: mod_base = OTHER; note = 2'Fluoro-adenosine
  modified_base 17: mod_base = OTHER; note = 2'O-methyl-uridine
  modified_base 18: mod_base = OTHER; note = 2'O-methyl-cytidine
  modified_base 19: mod_base = OTHER; note = 2'O-methyl-uridine
  modified_base 20: mod_base = OTHER; note = 2'O-methyl-cytidine
  modified_base 21: mod_base = OTHER; note = 2'O-methyl-adenosine
  modified_base 22: mod_base = OTHER; note = 2'O-methyl-uridine
  modified_base 23: mod_base = OTHER; note = 2'O-methyl-cytidine
  modified_base 1..2: mod_base = OTHER; note = phosphorothioate linkage
  modified_base 2..3: mod_base = OTHER; note = phosphorothioate linkage
  modified_base 21..22: mod_base = OTHER; note = phosphorothioate linkage
  modified_base 22..23: mod_base = OTHER; note = phosphorothioate linkage
  source 1..23: mol_type = other RNA
ttggtttcaggattaatctcatc

SEQ ID NO: 250 - RNA, 23 nt, synthetic construct
  misc_feature 1..23: note = Description of origin: ZPI siRNA antisense strands
  misc_feature 1..23: note = Description of source:Antisense strand ID:
  modified_base 1: mod_base = OTHER; note = 2'O-methyl-guanosine
  modified_base 2: mod_base = OTHER; note = 2' Fluoro-uridine
  modified_base 3: mod_base = OTHER; note = 2'O-methyl-uridine
  modified_base 4: mod_base = OTHER; note = 2' Fluoro-uridine
  modified_base 5: mod_base = OTHER; note = 2'O-methyl-cytidine
  modified_base 6: mod_base = OTHER; note = 2'Fluoro-adenosine
  modified_base 7: mod_base = OTHER; note = 2'O-methyl-guanosine
  modified_base 8: mod_base = OTHER; note = 2' Fluoro-guanosine
  modified_base 9: mod_base = OTHER; note = 2'Fluoro-adenosine
  modified_base 10: mod_base = OTHER; note = 2'O-methyl-uridine
  modified_base 11: mod_base = OTHER; note = 2'O-methyl-uridine
  modified_base 12: mod_base = OTHER; note = 2'O-methyl-adenosine
  modified_base 13: mod_base = OTHER; note = 2'O-methyl-adenosine
  modified_base 14: mod_base = OTHER; note = 2' Fluoro-uridine
  modified_base 15: mod_base = OTHER; note = 2'O-methyl-cytidine
  modified_base 16: mod_base = OTHER; note = 2' Fluoro-uridine
  modified_base 17: mod_base = OTHER; note = 2'O-methyl-cytidine
  modified_base 18: mod_base = OTHER; note = 2'O-methyl-adenosine
  modified_base 19: mod_base = OTHER; note = 2'O-methyl-uridine
  modified_base 20: mod_base = OTHER; note = 2'O-methyl-cytidine
  modified_base 21: mod_base = OTHER; note = 2'O-methyl-adenosine
  modified_base 22: mod_base = OTHER; note = 2'O-methyl-adenosine
  modified_base 23: mod_base = OTHER; note = 2'O-methyl-adenosine
  modified_base 1..2: mod_base = OTHER; note = phosphorothioate linkage
  modified_base 2..3: mod_base = OTHER; note = phosphorothioate linkage
  modified_base 21..22: mod_base = OTHER; note = phosphorothioate linkage
  modified_base 22..23: mod_base = OTHER; note = phosphorothioate linkage
  source 1..23: mol_type = other RNA
gtttcaggattaatctcatcaaa

SEQ ID NO: 251 - RNA, 23 nt, synthetic construct
  misc_feature 1..23: note = Description of origin: ZPI siRNA antisense strands
  misc_feature 1..23: note = Description of source:Antisense strand ID:
  modified_base 1: mod_base = OTHER; note = 2'O-methyl-uridine
  modified_base 2: mod_base = OTHER; note = 2' Fluoro-guanosine
  modified_base 3: mod_base = OTHER; note = 2'O-methyl-guanosine
  modified_base 4: mod_base = OTHER; note = 2' Fluoro-uridine
  modified_base 5: mod_base = OTHER; note = 2'O-methyl-uridine
  modified_base 6: mod_base = OTHER; note = 2' Fluoro-uridine
  modified_base 7: mod_base = OTHER; note = 2'O-methyl-cytidine
  modified_base 8: mod_base = OTHER; note = 2'Fluoro-adenosine
  modified_base 9: mod_base = OTHER; note = 2' Fluoro-guanosine
  modified_base 10: mod_base = OTHER; note = 2'O-methyl-guanosine
  modified_base 11: mod_base = OTHER; note = 2'O-methyl-adenosine
  modified_base 12: mod_base = OTHER; note = 2'O-methyl-uridine
  modified_base 13: mod_base = OTHER; note = 2'O-methyl-uridine
  modified_base 14: mod_base = OTHER; note = 2'Fluoro-adenosine
  modified_base 15: mod_base = OTHER; note = 2'O-methyl-adenosine
  modified_base 16: mod_base = OTHER; note = 2' Fluoro-uridine
  modified_base 17: mod_base = OTHER; note = 2'O-methyl-cytidine
  modified_base 18: mod_base = OTHER; note = 2'O-methyl-uridine
  modified_base 19: mod_base = OTHER; note = 2'O-methyl-cytidine
  modified_base 20: mod_base = OTHER; note = 2'O-methyl-adenosine
  modified_base 21: mod_base = OTHER; note = 2'O-methyl-uridine
  modified_base 22: mod_base = OTHER; note = 2'O-methyl-cytidine
  modified_base 23: mod_base = OTHER; note = 2'O-methyl-adenosine
  modified_base 1..2: mod_base = OTHER; note = phosphorothioate linkage
  modified_base 2..3: mod_base = OTHER; note = phosphorothioate linkage
  modified_base 21..22: mod_base = OTHER; note = phosphorothioate linkage
  modified_base 22..23: mod_base = OTHER; note = phosphorothioate linkage
  source 1..23: mol_type = other RNA
tggtttcaggattaatctcatca

SEQ ID NO: 252 - RNA, 23 nt, synthetic construct
  misc_feature 1..23: note = Description of origin: ZPI siRNA antisense strands
  misc_feature 1..23: note = Description of source:Antisense strand ID:
  modified_base 1: mod_base = OTHER; note = 2'O-methyl-guanosine
  modified_base 2: mod_base = OTHER; note = 2' Fluoro-guanosine
  modified_base 3: mod_base = OTHER; note = 2'O-methyl-uridine
  modified_base 4: mod_base = OTHER; note = 2' Fluoro-uridine
  modified_base 5: mod_base = OTHER; note = 2'O-methyl-uridine
  modified_base 6: mod_base = OTHER; note = 2' Fluoro-cytidine
  modified_base 7: mod_base = OTHER; note = 2'O-methyl-adenosine
  modified_base 8: mod_base = OTHER; note = 2' Fluoro-guanosine
  modified_base 9: mod_base = OTHER; note = 2' Fluoro-guanosine
  modified_base 10: mod_base = OTHER; note = 2'O-methyl-adenosine
  modified_base 11: mod_base = OTHER; note = 2'O-methyl-uridine
  modified_base 12: mod_base = OTHER; note = 2'O-methyl-uridine
  modified_base 13: mod_base = OTHER; note = 2'O-methyl-adenosine
  modified_base 14: mod_base = OTHER; note = 2'Fluoro-adenosine
  modified_base 15: mod_base = OTHER; note = 2'O-methyl-uridine
  modified_base 16: mod_base = OTHER; note = 2' Fluoro-cytidine
  modified_base 17: mod_base = OTHER; note = 2'O-methyl-uridine
  modified_base 18: mod_base = OTHER; note = 2'O-methyl-cytidine
  modified_base 19: mod_base = OTHER; note = 2'O-methyl-adenosine
  modified_base 20: mod_base = OTHER; note = 2'O-methyl-uridine
  modified_base 21: mod_base = OTHER; note = 2'O-methyl-cytidine
  modified_base 22: mod_base = OTHER; note = 2'O-methyl-adenosine
  modified_base 23: mod_base = OTHER; note = 2'O-methyl-adenosine
  modified_base 1..2: mod_base = OTHER; note = phosphorothioate linkage
  modified_base 2..3: mod_base = OTHER; note = phosphorothioate linkage
  modified_base 21..22: mod_base = OTHER; note = phosphorothioate linkage
  modified_base 22..23: mod_base = OTHER; note = phosphorothioate linkage
  source 1..23: mol_type = other RNA
ggtttcaggattaatctcatcaa

SEQ ID NO: 253 - RNA, 23 nt, synthetic construct
  misc_feature 1..23: note = Description of origin: ZPI siRNA antisense strands
  misc_feature 1..23: note = Description of source:Antisense strand ID:
  modified_base 1: mod_base = OTHER; note = 2'O-methyl-adenosine
  modified_base 2: mod_base = OTHER; note = 2' Fluoro-guanosine
  modified_base 3: mod_base = OTHER; note = 2'O-methyl-guanosine
  modified_base 4: mod_base = OTHER; note = 2'Fluoro-adenosine
  modified_base 5: mod_base = OTHER; note = 2'O-methyl-uridine
  modified_base 6: mod_base = OTHER; note = 2' Fluoro-uridine
  modified_base 7: mod_base = OTHER; note = 2'O-methyl-adenosine
  modified_base 8: mod_base = OTHER; note = 2'Fluoro-adenosine
  modified_base 9: mod_base = OTHER; note = 2' Fluoro-uridine
  modified_base 10: mod_base = OTHER; note = 2'O-methyl-cytidine
  modified_base 11: mod_base = OTHER; note = 2'O-methyl-uridine
  modified_base 12: mod_base = OTHER; note = 2'O-methyl-cytidine
  modified_base 13: mod_base = OTHER; note = 2'O-methyl-adenosine
  modified_base 14: mod_base = OTHER; note = 2' Fluoro-uridine
  modified_base 15: mod_base = OTHER; note = 2'O-methyl-cytidine
  modified_base 16: mod_base = OTHER; note = 2'Fluoro-adenosine
  modified_base 17: mod_base = OTHER; note = 2'O-methyl-adenosine
  modified_base 18: mod_base = OTHER; note = 2'O-methyl-adenosine
  modified_base 19: mod_base = OTHER; note = 2'O-methyl-cytidine
  modified_base 20: mod_base = OTHER; note = 2'O-methyl-adenosine
  modified_base 21: mod_base = OTHER; note = 2'O-methyl-guanosine
  modified_base 22: mod_base = OTHER; note = 2'O-methyl-uridine
  modified_base 23: mod_base = OTHER; note = 2'O-methyl-uridine
  modified_base 1..2: mod_base = OTHER; note = phosphorothioate linkage
  modified_base 2..3: mod_base = OTHER; note = phosphorothioate linkage
  modified_base 21..22: mod_base = OTHER; note = phosphorothioate linkage
  modified_base 22..23: mod_base = OTHER; note = phosphorothioate linkage
  source 1..23: mol_type = other RNA
aggattaatctcatcaaacagtt

SEQ ID NO: 254 - RNA, 23 nt, synthetic construct
  misc_feature 1..23: note = Description of origin: ZPI siRNA antisense strands
  misc_feature 1..23: note = Description of source:Antisense strand ID:
  modified_base 1: mod_base = OTHER; note = 2'O-methyl-uridine
  modified_base 2: mod_base = OTHER; note = 2' Fluoro-cytidine
  modified_base 3: mod_base = OTHER; note = 2'O-methyl-cytidine
  modified_base 4: mod_base = OTHER; note = 2' Fluoro-uridine
  modified_base 5: mod_base = OTHER; note = 2'O-methyl-uridine
  modified_base 6: mod_base = OTHER; note = 2' Fluoro-guanosine
  modified_base 7: mod_base = OTHER; note = 2'O-methyl-uridine
  modified_base 8: mod_base = OTHER; note = 2' Fluoro-guanosine
  modified_base 9: mod_base = OTHER; note = 2' Fluoro-guanosine
  modified_base 10: mod_base = OTHER; note = 2'O-methyl-adenosine
  modified_base 11: mod_base = OTHER; note = 2'O-methyl-uridine
  modified_base 12: mod_base = OTHER; note = 2'O-methyl-guanosine
  modified_base 13: mod_base = OTHER; note = 2'O-methyl-adenosine
  modified_base 14: mod_base = OTHER; note = 2'Fluoro-adenosine
  modified_base 15: mod_base = OTHER; note = 2'O-methyl-guanosine
  modified_base 16: mod_base = OTHER; note = 2' Fluoro-guanosine
  modified_base 17: mod_base = OTHER; note = 2'O-methyl-cytidine
  modified_base 18: mod_base = OTHER; note = 2'O-methyl-adenosine
  modified_base 19: mod_base = OTHER; note = 2'O-methyl-adenosine
  modified_base 20: mod_base = OTHER; note = 2'O-methyl-adenosine
  modified_base 21: mod_base = OTHER; note = 2'O-methyl-adenosine
  modified_base 22: mod_base = OTHER; note = 2'O-methyl-cytidine
  modified_base 23: mod_base = OTHER; note = 2'O-methyl-uridine
  modified_base 1..2: mod_base = OTHER; note = phosphorothioate linkage
  modified_base 2..3: mod_base = OTHER; note = phosphorothioate linkage
  modified_base 21..22: mod_base = OTHER; note = phosphorothioate linkage
  modified_base 22..23: mod_base = OTHER; note = phosphorothioate linkage
  source 1..23: mol_type = other RNA
tccttgtggatgaaggcaaaact

SEQ ID NO: 255 - RNA, 23 nt, synthetic construct
  misc_feature 1..23: note = Description of origin: ZPI siRNA antisense strands
  misc_feature 1..23: note = Description of source:Antisense strand ID:
  modified_base 1: mod_base = OTHER; note = 2'O-methyl-guanosine
  modified_base 2: mod_base = OTHER; note = 2' Fluoro-uridine
  modified_base 3: mod_base = OTHER; note = 2'O-methyl-guanosine
  modified_base 4: mod_base = OTHER; note = 2' Fluoro-cytidine
  modified_base 5: mod_base = OTHER; note = 2'O-methyl-cytidine
  modified_base 6: mod_base = OTHER; note = 2' Fluoro-uridine
  modified_base 7: mod_base = OTHER; note = 2'O-methyl-cytidine
  modified_base 8: mod_base = OTHER; note = 2'Fluoro-adenosine
  modified_base 9: mod_base = OTHER; note = 2' Fluoro-uridine
  modified_base 10: mod_base = OTHER; note = 2'O-methyl-guanosine
  modified_base 11: mod_base = OTHER; note = 2'O-methyl-guanosine
  modified_base 12: mod_base = OTHER; note = 2'O-methyl-adenosine
  modified_base 13: mod_base = OTHER; note = 2'O-methyl-guanosine
  modified_base 14: mod_base = OTHER; note = 2'Fluoro-adenosine
  modified_base 15: mod_base = OTHER; note = 2'O-methyl-uridine
  modified_base 16: mod_base = OTHER; note = 2' Fluoro-cytidine
  modified_base 17: mod_base = OTHER; note = 2'O-methyl-uridine
  modified_base 18: mod_base = OTHER; note = 2'O-methyl-uridine
  modified_base 19: mod_base = OTHER; note = 2'O-methyl-uridine
  modified_base 20: mod_base = OTHER; note = 2'O-methyl-cytidine
  modified_base 21: mod_base = OTHER; note = 2'O-methyl-guanosine
  modified_base 22: mod_base = OTHER; note = 2'O-methyl-cytidine
  modified_base 23: mod_base = OTHER; note = 2'O-methyl-adenosine
  modified_base 1..2: mod_base = OTHER; note = phosphorothioate linkage
  modified_base 2..3: mod_base = OTHER; note = phosphorothioate linkage
  modified_base 21..22: mod_base = OTHER; note = phosphorothioate linkage
  modified_base 22..23: mod_base = OTHER; note = phosphorothioate linkage
  source 1..23: mol_type = other RNA
gtgcctcatggagatctttcgca

SEQ ID NO: 256 - RNA, 23 nt, synthetic construct
  misc_feature 1..23: note = Description of origin: ZPI siRNA antisense strands
  misc_feature 1..23: note = Description of source:Antisense strand ID:
  modified_base 1: mod_base = OTHER; note = 2'O-methyl-uridine
  modified_base 2: mod_base = OTHER; note = 2' Fluoro-cytidine
  modified_base 3: mod_base = OTHER; note = 2'O-methyl-uridine
  modified_base 4: mod_base = OTHER; note = 2' Fluoro-cytidine
  modified_base 5: mod_base = OTHER; note = 2'O-methyl-cytidine
  modified_base 6: mod_base = OTHER; note = 2'Fluoro-adenosine
  modified_base 7: mod_base = OTHER; note = 2'O-methyl-uridine
  modified_base 8: mod_base = OTHER; note = 2' Fluoro-guanosine
  modified_base 9: mod_base = OTHER; note = 2'Fluoro-adenosine
  modified_base 10: mod_base = OTHER; note = 2'O-methyl-guanosine
  modified_base 11: mod_base = OTHER; note = 2'O-methyl-guanosine
  modified_base 12: mod_base = OTHER; note = 2'O-methyl-adenosine
  modified_base 13: mod_base = OTHER; note = 2'O-methyl-cytidine
  modified_base 14: mod_base = OTHER; note = 2' Fluoro-cytidine
  modified_base 15: mod_base = OTHER; note = 2'O-methyl-adenosine
  modified_base 16: mod_base = OTHER; note = 2' Fluoro-cytidine
  modified_base 17: mod_base = OTHER; note = 2'O-methyl-cytidine
  modified_base 18: mod_base = OTHER; note = 2'O-methyl-adenosine
  modified_base 19: mod_base = OTHER; note = 2'O-methyl-guanosine
  modified_base 20: mod_base = OTHER; note = 2'O-methyl-cytidine
  modified_base 21: mod_base = OTHER; note = 2'O-methyl-adenosine
  modified_base 22: mod_base = OTHER; note = 2'O-methyl-uridine
  modified_base 23: mod_base = OTHER; note = 2'O-methyl-guanosine
  modified_base 1..2: mod_base = OTHER; note = phosphorothioate linkage
  modified_base 2..3: mod_base = OTHER; note = phosphorothioate linkage
  modified_base 21..22: mod_base = OTHER; note = phosphorothioate linkage
  modified_base 22..23: mod_base = OTHER; note = phosphorothioate linkage
  source 1..23: mol_type = other RNA
tctccatgaggaccaccagcatg

SEQ ID NO: 257 - RNA, 23 nt, synthetic construct
  misc_feature 1..23: note = Description of origin: ZPI siRNA antisense strands
  misc_feature 1..23: note = Description of source:Antisense strand ID:
  modified_base 1: mod_base = OTHER; note = 2'O-methyl-cytidine
  modified_base 2: mod_base = OTHER; note = 2'Fluoro-adenosine
  modified_base 3: mod_base = OTHER; note = 2'O-methyl-adenosine
  modified_base 4: mod_base = OTHER; note = 2'Fluoro-adenosine
  modified_base 5: mod_base = OTHER; note = 2'O-methyl-adenosine
  modified_base 6: mod_base = OTHER; note = 2' Fluoro-uridine
  modified_base 7: mod_base = OTHER; note = 2'O-methyl-cytidine
  modified_base 8: mod_base = OTHER; note = 2' Fluoro-cytidine
  modified_base 9: mod_base = OTHER; note = 2' Fluoro-uridine
  modified_base 10: mod_base = OTHER; note = 2'O-methyl-uridine
  modified_base 11: mod_base = OTHER; note = 2'O-methyl-guanosine
  modified_base 12: mod_base = OTHER; note = 2'O-methyl-uridine
  modified_base 13: mod_base = OTHER; note = 2'O-methyl-guanosine
  modified_base 14: mod_base = OTHER; note = 2' Fluoro-guanosine
  modified_base 15: mod_base = OTHER; note = 2'O-methyl-adenosine
  modified_base 16: mod_base = OTHER; note = 2' Fluoro-uridine
  modified_base 17: mod_base = OTHER; note = 2'O-methyl-guanosine
  modified_base 18: mod_base = OTHER; note = 2'O-methyl-adenosine
  modified_base 19: mod_base = OTHER; note = 2'O-methyl-adenosine
  modified_base 20: mod_base = OTHER; note = 2'O-methyl-guanosine
  modified_base 21: mod_base = OTHER; note = 2'O-methyl-guanosine
  modified_base 22: mod_base = OTHER; note = 2'O-methyl-cytidine
  modified_base 23: mod_base = OTHER; note = 2'O-methyl-adenosine
  modified_base 1..2: mod_base = OTHER; note = phosphorothioate linkage
  modified_base 2..3: mod_base = OTHER; note = phosphorothioate linkage
  modified_base 21..22: mod_base = OTHER; note = phosphorothioate linkage
  modified_base 22..23: mod_base = OTHER; note = phosphorothioate linkage
  source 1..23: mol_type = other RNA
caaaatccttgtggatgaaggca

SEQ ID NO: 258 - RNA, 23 nt, synthetic construct
  misc_feature 1..23: note = Description of origin: ZPI siRNA antisense strands
  misc_feature 1..23: note = Description of source:Antisense strand ID:
  modified_base 1: mod_base = OTHER; note = 2'O-methyl-cytidine
  modified_base 2: mod_base = OTHER; note = 2' Fluoro-guanosine
  modified_base 3: mod_base = OTHER; note = 2'O-methyl-uridine
  modified_base 4: mod_base = OTHER; note = 2' Fluoro-guanosine
  modified_base 5: mod_base = OTHER; note = 2'O-methyl-cytidine
  modified_base 6: mod_base = OTHER; note = 2' Fluoro-cytidine
  modified_base 7: mod_base = OTHER; note = 2'O-methyl-uridine
  modified_base 8: mod_base = OTHER; note = 2' Fluoro-cytidine
  modified_base 9: mod_base = OTHER; note = 2'Fluoro-adenosine
  modified_base 10: mod_base = OTHER; note = 2'O-methyl-uridine
  modified_base 11: mod_base = OTHER; note = 2'O-methyl-guanosine
  modified_base 12: mod_base = OTHER; note = 2'O-methyl-guanosine
  modified_base 13: mod_base = OTHER; note = 2'O-methyl-adenosine
  modified_base 14: mod_base = OTHER; note = 2' Fluoro-guanosine
  modified_base 15: mod_base = OTHER; note = 2'O-methyl-adenosine
  modified_base 16: mod_base = OTHER; note = 2' Fluoro-uridine
  modified_base 17: mod_base = OTHER; note = 2'O-methyl-cytidine
  modified_base 18: mod_base = OTHER; note = 2'O-methyl-uridine
  modified_base 19: mod_base = OTHER; note = 2'O-methyl-uridine
  modified_base 20: mod_base = OTHER; note = 2'O-methyl-uridine
  modified_base 21: mod_base = OTHER; note = 2'O-methyl-cytidine
  modified_base 22: mod_base = OTHER; note = 2'O-methyl-guanosine
  modified_base 23: mod_base = OTHER; note = 2'O-methyl-cytidine
  modified_base 1..2: mod_base = OTHER; note = phosphorothioate linkage
  modified_base 2..3: mod_base = OTHER; note = phosphorothioate linkage
  modified_base 21..22: mod_base = OTHER; note = phosphorothioate linkage
  modified_base 22..23: mod_base = OTHER; note = phosphorothioate linkage
  source 1..23: mol_type = other RNA
cgtgcctcatggagatctttcgc

SEQ ID NO: 259 - RNA, 23 nt, synthetic construct
  misc_feature 1..23: note = Description of origin: ZPI siRNA antisense strands
  misc_feature 1..23: note = Description of source:Antisense strand ID:
  modified_base 1: mod_base = OTHER; note = 2'O-methyl-adenosine
  modified_base 2: mod_base = OTHER; note = 2' Fluoro-uridine
  modified_base 3: mod_base = OTHER; note = 2'O-methyl-cytidine
  modified_base 4: mod_base = OTHER; note = 2'Fluoro-adenosine
  modified_base 5: mod_base = OTHER; note = 2'O-methyl-adenosine
  modified_base 6: mod_base = OTHER; note = 2'Fluoro-adenosine
  modified_base 7: mod_base = OTHER; note = 2'O-methyl-adenosine
  modified_base 8: mod_base = OTHER; note = 2' Fluoro-uridine
  modified_base 9: mod_base = OTHER; note = 2' Fluoro-cytidine
  modified_base 10: mod_base = OTHER; note = 2'O-methyl-cytidine
  modified_base 11: mod_base = OTHER; note = 2'O-methyl-uridine
  modified_base 12: mod_base = OTHER; note = 2'O-methyl-uridine
  modified_base 13: mod_base = OTHER; note = 2'O-methyl-guanosine
  modified_base 14: mod_base = OTHER; note = 2' Fluoro-uridine
  modified_base 15: mod_base = OTHER; note = 2'O-methyl-guanosine
  modified_base 16: mod_base = OTHER; note = 2' Fluoro-guanosine
  modified_base 17: mod_base = OTHER; note = 2'O-methyl-adenosine
  modified_base 18: mod_base = OTHER; note = 2'O-methyl-uridine
  modified_base 19: mod_base = OTHER; note = 2'O-methyl-guanosine
  modified_base 20: mod_base = OTHER; note = 2'O-methyl-adenosine
  modified_base 21: mod_base = OTHER; note = 2'O-methyl-adenosine
  modified_base 22: mod_base = OTHER; note = 2'O-methyl-guanosine
  modified_base 23: mod_base = OTHER; note = 2'O-methyl-guanosine
  modified_base 1..2: mod_base = OTHER; note = phosphorothioate linkage
  modified_base 2..3: mod_base = OTHER; note = phosphorothioate linkage
  modified_base 21..22: mod_base = OTHER; note = phosphorothioate linkage
  modified_base 22..23: mod_base = OTHER; note = phosphorothioate linkage
  source 1..23: mol_type = other RNA
atcaaaatccttgtggatgaagg

SEQ ID NO: 260 - RNA, 23 nt, synthetic construct
  misc_feature 1..23: note = Description of origin: ZPI siRNA antisense strands
  misc_feature 1..23: note = Description of source:Antisense strand ID:
  modified_base 1: mod_base = OTHER; note = 2'O-methyl-uridine
  modified_base 2: mod_base = OTHER; note = 2' Fluoro-uridine
  modified_base 3: mod_base = OTHER; note = 2'O-methyl-cytidine
  modified_base 4: mod_base = OTHER; note = 2'Fluoro-adenosine
  modified_base 5: mod_base = OTHER; note = 2'O-methyl-guanosine
  modified_base 6: mod_base = OTHER; note = 2' Fluoro-guanosine
  modified_base 7: mod_base = OTHER; note = 2'O-methyl-adenosine
  modified_base 8: mod_base = OTHER; note = 2' Fluoro-uridine
  modified_base 9: mod_base = OTHER; note = 2' Fluoro-uridine
  modified_base 10: mod_base = OTHER; note = 2'O-methyl-adenosine
  modified_base 11: mod_base = OTHER; note = 2'O-methyl-adenosine
  modified_base 12: mod_base = OTHER; note = 2'O-methyl-uridine
  modified_base 13: mod_base = OTHER; note = 2'O-methyl-cytidine
  modified_base 14: mod_base = OTHER; note = 2' Fluoro-uridine
  modified_base 15: mod_base = OTHER; note = 2'O-methyl-cytidine
  modified_base 16: mod_base = OTHER; note = 2'Fluoro-adenosine
  modified_base 17: mod_base = OTHER; note = 2'O-methyl-uridine
  modified_base 18: mod_base = OTHER; note = 2'O-methyl-cytidine
  modified_base 19: mod_base = OTHER; note = 2'O-methyl-adenosine
  modified_base 20: mod_base = OTHER; note = 2'O-methyl-adenosine
  modified_base 21: mod_base = OTHER; note = 2'O-methyl-adenosine
  modified_base 22: mod_base = OTHER; note = 2'O-methyl-cytidine
  modified_base 23: mod_base = OTHER; note = 2'O-methyl-adenosine
  modified_base 1..2: mod_base = OTHER; note = phosphorothioate linkage
  modified_base 2..3: mod_base = OTHER; note = phosphorothioate linkage
  modified_base 21..22: mod_base = OTHER; note = phosphorothioate linkage
  modified_base 22..23: mod_base = OTHER; note = phosphorothioate linkage
  source 1..23: mol_type = other RNA
ttcaggattaatctcatcaaaca

SEQ ID NO: 261 - RNA, 23 nt, synthetic construct
  misc_feature 1..23: note = Description of origin: ZPI siRNA antisense strands
  misc_feature 1..23: note = Description of source:Antisense strand ID:
  modified_base 1: mod_base = OTHER; note = 2'O-methyl-adenosine
  modified_base 2: mod_base = OTHER; note = 2'Fluoro-adenosine
  modified_base 3: mod_base = OTHER; note = 2'O-methyl-uridine
  modified_base 4: mod_base = OTHER; note = 2' Fluoro-cytidine
  modified_base 5: mod_base = OTHER; note = 2'O-methyl-cytidine
  modified_base 6: mod_base = OTHER; note = 2' Fluoro-uridine
  modified_base 7: mod_base = OTHER; note = 2'O-methyl-uridine
  modified_base 8: mod_base = OTHER; note = 2' Fluoro-guanosine
  modified_base 9: mod_base = OTHER; note = 2' Fluoro-uridine
  modified_base 10: mod_base = OTHER; note = 2'O-methyl-guanosine
  modified_base 11: mod_base = OTHER; note = 2'O-methyl-guanosine
  modified_base 12: mod_base = OTHER; note = 2'O-methyl-adenosine
  modified_base 13: mod_base = OTHER; note = 2'O-methyl-uridine
  modified_base 14: mod_base = OTHER; note = 2' Fluoro-guanosine
  modified_base 15: mod_base = OTHER; note = 2'O-methyl-adenosine
  modified_base 16: mod_base = OTHER; note = 2'Fluoro-adenosine
  modified_base 17: mod_base = OTHER; note = 2'O-methyl-guanosine
  modified_base 18: mod_base = OTHER; note = 2'O-methyl-guanosine
  modified_base 19: mod_base = OTHER; note = 2'O-methyl-cytidine
  modified_base 20: mod_base = OTHER; note = 2'O-methyl-adenosine
  modified_base 21: mod_base = OTHER; note = 2'O-methyl-adenosine
  modified_base 22: mod_base = OTHER; note = 2'O-methyl-adenosine
  modified_base 23: mod_base = OTHER; note = 2'O-methyl-adenosine
  modified_base 1..2: mod_base = OTHER; note = phosphorothioate linkage
  modified_base 2..3: mod_base = OTHER; note = phosphorothioate linkage
  modified_base 21..22: mod_base = OTHER; note = phosphorothioate linkage
  modified_base 22..23: mod_base = OTHER; note = phosphorothioate linkage
  source 1..23: mol_type = other RNA
aatccttgtggatgaaggcaaaa

SEQ ID NO: 262 - RNA, 23 nt, synthetic construct
  misc_feature 1..23: note = Description of origin: ZPI siRNA antisense strands
  misc_feature 1..23: note = Description of source:Antisense strand ID:
  modified_base 1: mod_base = OTHER; note = 2'O-methyl-cytidine
  modified_base 2: mod_base = OTHER; note = 2' Fluoro-cytidine
  modified_base 3: mod_base = OTHER; note = 2'O-methyl-adenosine
  modified_base 4: mod_base = OTHER; note = 2' Fluoro-uridine
  modified_base 5: mod_base = OTHER; note = 2'O-methyl-cytidine
  modified_base 6: mod_base = OTHER; note = 2' Fluoro-guanosine
  modified_base 7: mod_base = OTHER; note = 2'O-methyl-uridine
  modified_base 8: mod_base = OTHER; note = 2' Fluoro-guanosine
  modified_base 9: mod_base = OTHER; note = 2' Fluoro-cytidine
  modified_base 10: mod_base = OTHER; note = 2'O-methyl-cytidine
  modified_base 11: mod_base = OTHER; note = 2'O-methyl-uridine
  modified_base 12: mod_base = OTHER; note = 2'O-methyl-cytidine
  modified_base 13: mod_base = OTHER; note = 2'O-methyl-adenosine
  modified_base 14: mod_base = OTHER; note = 2' Fluoro-uridine
  modified_base 15: mod_base = OTHER; note = 2'O-methyl-guanosine
  modified_base 16: mod_base = OTHER; note = 2' Fluoro-guanosine
  modified_base 17: mod_base = OTHER; note = 2'O-methyl-adenosine
  modified_base 18: mod_base = OTHER; note = 2'O-methyl-guanosine
  modified_base 19: mod_base = OTHER; note = 2'O-methyl-adenosine
  modified_base 20: mod_base = OTHER; note = 2'O-methyl-uridine
  modified_base 21: mod_base = OTHER; note = 2'O-methyl-cytidine
  modified_base 22: mod_base = OTHER; note = 2'O-methyl-uridine
  modified_base 23: mod_base = OTHER; note = 2'O-methyl-uridine
  modified_base 1..2: mod_base = OTHER; note = phosphorothioate linkage
  modified_base 2..3: mod_base = OTHER; note = phosphorothioate linkage
  modified_base 21..22: mod_base = OTHER; note = phosphorothioate linkage
  modified_base 22..23: mod_base = OTHER; note = phosphorothioate linkage
  source 1..23: mol_type = other RNA
ccatcgtgcctcatggagatctt

SEQ ID NO: 263 - RNA, 23 nt, synthetic construct
  misc_feature 1..23: note = Description of origin: ZPI siRNA antisense strands
  misc_feature 1..23: note = Description of source:Antisense strand ID:
  modified_base 1: mod_base = OTHER; note = 2'O-methyl-adenosine
  modified_base 2: mod_base = OTHER; note = 2'Fluoro-adenosine
  modified_base 3: mod_base = OTHER; note = 2'O-methyl-adenosine
  modified_base 4: mod_base = OTHER; note = 2' Fluoro-uridine
  modified_base 5: mod_base = OTHER; note = 2'O-methyl-cytidine
  modified_base 6: mod_base = OTHER; note = 2' Fluoro-cytidine
  modified_base 7: mod_base = OTHER; note = 2'O-methyl-uridine
  modified_base 8: mod_base = OTHER; note = 2'O-methyl-uridine
  modified_base 9: mod_base = OTHER; note = 2'O-methyl-guanosine
  modified_base 10: mod_base = OTHER; note = 2'O-methyl-uridine
  modified_base 11: mod_base = OTHER; note = 2'O-methyl-guanosine
  modified_base 12: mod_base = OTHER; note = 2'O-methyl-guanosine
  modified_base 13: mod_base = OTHER; note = 2'O-methyl-adenosine
  modified_base 14: mod_base = OTHER; note = 2' Fluoro-uridine
  modified_base 15: mod_base = OTHER; note = 2'O-methyl-guanosine
  modified_base 16: mod_base = OTHER; note = 2'Fluoro-adenosine
  modified_base 17: mod_base = OTHER; note = 2'O-methyl-adenosine
  modified_base 18: mod_base = OTHER; note = 2'O-methyl-guanosine
  modified_base 19: mod_base = OTHER; note = 2'O-methyl-guanosine
  modified_base 20: mod_base = OTHER; note = 2'O-methyl-cytidine
  modified_base 21: mod_base = OTHER; note = 2'O-methyl-adenosine
  modified_base 22: mod_base = OTHER; note = 2'O-methyl-adenosine
  modified_base 23: mod_base = OTHER; note = 2'O-methyl-adenosine
  modified_base 1..2: mod_base = OTHER; note = phosphorothioate linkage
  modified_base 2..3: mod_base = OTHER; note = phosphorothioate linkage
  modified_base 21..22: mod_base = OTHER; note = phosphorothioate linkage
  modified_base 22..23: mod_base = OTHER; note = phosphorothioate linkage
  source 1..23: mol_type = other RNA
aaatccttgtggatgaaggcaaa

SEQ ID NO: 264 - RNA, 23 nt, synthetic construct
  misc_feature 1..23: note = Description of origin: ZPI siRNA antisense strands
  misc_feature 1..23: note = Description of source:Antisense strand ID:
  modified_base 1: mod_base = OTHER; note = 2'O-methyl-guanosine
  modified_base 2: mod_base = OTHER; note = 2' Fluoro-cytidine
  modified_base 3: mod_base = OTHER; note = 2'O-methyl-cytidine
  modified_base 4: mod_base = OTHER; note = 2' Fluoro-uridine
  modified_base 5: mod_base = OTHER; note = 2'O-methyl-cytidine
  modified_base 6: mod_base = OTHER; note = 2'Fluoro-adenosine
  modified_base 7: mod_base = OTHER; note = 2'O-methyl-uridine
  modified_base 8: mod_base = OTHER; note = 2'O-methyl-guanosine
  modified_base 9: mod_base = OTHER; note = 2'O-methyl-guanosine
  modified_base 10: mod_base = OTHER; note = 2'O-methyl-adenosine
  modified_base 11: mod_base = OTHER; note = 2'O-methyl-guanosine
  modified_base 12: mod_base = OTHER; note = 2'O-methyl-adenosine
  modified_base 13: mod_base = OTHER; note = 2'O-methyl-uridine
  modified_base 14: mod_base = OTHER; note = 2' Fluoro-cytidine
  modified_base 15: mod_base = OTHER; note = 2'O-methyl-uridine
  modified_base 16: mod_base = OTHER; note = 2' Fluoro-uridine
  modified_base 17: mod_base = OTHER; note = 2'O-methyl-uridine
  modified_base 18: mod_base = OTHER; note = 2'O-methyl-cytidine
  modified_base 19: mod_base = OTHER; note = 2'O-methyl-guanosine
  modified_base 20: mod_base = OTHER; note = 2'O-methyl-cytidine
  modified_base 21: mod_base = OTHER; note = 2'O-methyl-adenosine
  modified_base 22: mod_base = OTHER; note = 2'O-methyl-guanosine
  modified_base 23: mod_base = OTHER; note = 2'O-methyl-cytidine
  modified_base 1..2: mod_base = OTHER; note = phosphorothioate linkage
  modified_base 2..3: mod_base = OTHER; note = phosphorothioate linkage
  modified_base 21..22: mod_base = OTHER; note = phosphorothioate linkage
  modified_base 22..23: mod_base = OTHER; note = phosphorothioate linkage
  source 1..23: mol_type = other RNA
gcctcatggagatctttcgcagc

SEQ ID NO: 265 - RNA, 23 nt, synthetic construct
  misc_feature 1..23: note = Description of origin: ZPI siRNA antisense strands
  misc_feature 1..23: note = Description of source:Antisense strand ID:
  modified_base 1: mod_base = OTHER; note = 2'O-methyl-uridine
  modified_base 2: mod_base = OTHER; note = 2' Fluoro-uridine
  modified_base 3: mod_base = OTHER; note = 2'O-methyl-cytidine
  modified_base 4: mod_base = OTHER; note = 2' Fluoro-uridine
  modified_base 5: mod_base = OTHER; note = 2'O-methyl-cytidine
  modified_base 6: mod_base = OTHER; note = 2' Fluoro-cytidine
  modified_base 7: mod_base = OTHER; note = 2'O-methyl-adenosine
  modified_base 8: mod_base = OTHER; note = 2'O-methyl-uridine
  modified_base 9: mod_base = OTHER; note = 2'O-methyl-guanosine
  modified_base 10: mod_base = OTHER; note = 2'O-methyl-adenosine
  modified_base 11: mod_base = OTHER; note = 2'O-methyl-guanosine
  modified_base 12: mod_base = OTHER; note = 2'O-methyl-guanosine
  modified_base 13: mod_base = OTHER; note = 2'O-methyl-adenosine
  modified_base 14: mod_base = OTHER; note = 2' Fluoro-cytidine
  modified_base 15: mod_base = OTHER; note = 2'O-methyl-cytidine
  modified_base 16: mod_base = OTHER; note = 2'Fluoro-adenosine
  modified_base 17: mod_base = OTHER; note = 2'O-methyl-cytidine
  modified_base 18: mod_base = OTHER; note = 2'O-methyl-cytidine
  modified_base 19: mod_base = OTHER; note = 2'O-methyl-adenosine
  modified_base 20: mod_base = OTHER; note = 2'O-methyl-guanosine
  modified_base 21: mod_base = OTHER; note = 2'O-methyl-cytidine
  modified_base 22: mod_base = OTHER; note = 2'O-methyl-adenosine
  modified_base 23: mod_base = OTHER; note = 2'O-methyl-uridine
  modified_base 1..2: mod_base = OTHER; note = phosphorothioate linkage
  modified_base 2..3: mod_base = OTHER; note = phosphorothioate linkage
  modified_base 21..22: mod_base = OTHER; note = phosphorothioate linkage
  modified_base 22..23: mod_base = OTHER; note = phosphorothioate linkage
  source 1..23: mol_type = other RNA
ttctccatgaggaccaccagcat

SEQ ID NO: 266 - RNA, 23 nt, synthetic construct
  misc_feature 1..23: note = Description of origin: ZPI siRNA antisense strands
  misc_feature 1..23: note = Description of source:Antisense strand ID:
  modified_base 1: mod_base = OTHER; note = 2'O-methyl-uridine
  modified_base 2: mod_base = OTHER; note = 2' Fluoro-guanosine
  modified_base 3: mod_base = OTHER; note = 2'O-methyl-cytidine
  modified_base 4: mod_base = OTHER; note = 2' Fluoro-cytidine
  modified_base 5: mod_base = OTHER; note = 2'O-methyl-uridine
  modified_base 6: mod_base = OTHER; note = 2' Fluoro-cytidine
  modified_base 7: mod_base = OTHER; note = 2'O-methyl-adenosine
  modified_base 8: mod_base = OTHER; note = 2'O-methyl-uridine
  modified_base 9: mod_base = OTHER; note = 2'O-methyl-guanosine
  modified_base 10: mod_base = OTHER; note = 2'O-methyl-guanosine
  modified_base 11: mod_base = OTHER; note = 2'O-methyl-adenosine
  modified_base 12: mod_base = OTHER; note = 2'O-methyl-guanosine
  modified_base 13: mod_base = OTHER; note = 2'O-methyl-adenosine
  modified_base 14: mod_base = OTHER; note = 2' Fluoro-uridine
  modified_base 15: mod_base = OTHER; note = 2'O-methyl-cytidine
  modified_base 16: mod_base = OTHER; note = 2' Fluoro-uridine
  modified_base 17: mod_base = OTHER; note = 2'O-methyl-uridine
  modified_base 18: mod_base = OTHER; note = 2'O-methyl-uridine
  modified_base 19: mod_base = OTHER; note = 2'O-methyl-cytidine
  modified_base 20: mod_base = OTHER; note = 2'O-methyl-guanosine
  modified_base 21: mod_base = OTHER; note = 2'O-methyl-cytidine
  modified_base 22: mod_base = OTHER; note = 2'O-methyl-adenosine
  modified_base 23: mod_base = OTHER; note = 2'O-methyl-guanosine
  modified_base 1..2: mod_base = OTHER; note = phosphorothioate linkage
  modified_base 2..3: mod_base = OTHER; note = phosphorothioate linkage
  modified_base 21..22: mod_base = OTHER; note = phosphorothioate linkage
  modified_base 22..23: mod_base = OTHER; note = phosphorothioate linkage
  source 1..23: mol_type = other RNA
tgcctcatggagatctttcgcag

SEQ ID NO: 267 - RNA, 23 nt, synthetic construct
  misc_feature 1..23: note = Description of origin: ZPI siRNA antisense strands
  misc_feature 1..23: note = Description of source:Antisense strand ID:
  modified_base 1: mod_base = OTHER; note = 2'O-methyl-adenosine
  modified_base 2: mod_base = OTHER; note = 2' Fluoro-guanosine
  modified_base 3: mod_base = OTHER; note = 2'O-methyl-cytidine
  modified_base 4: mod_base = OTHER; note = 2'Fluoro-adenosine
  modified_base 5: mod_base = OTHER; note = 2'O-methyl-guanosine
  modified_base 6: mod_base = OTHER; note = 2' Fluoro-cytidine
  modified_base 7: mod_base = OTHER; note = 2'O-methyl-uridine
  modified_base 8: mod_base = OTHER; note = 2'O-methyl-cytidine
  modified_base 9: mod_base = OTHER; note = 2'O-methyl-adenosine
  modified_base 10: mod_base = OTHER; note = 2'O-methyl-uridine
  modified_base 11: mod_base = OTHER; note = 2'O-methyl-guanosine
  modified_base 12: mod_base = OTHER; note = 2'O-methyl-cytidine
  modified_base 13: mod_base = OTHER; note = 2'O-methyl-adenosine
  modified_base 14: mod_base = OTHER; note = 2' Fluoro-uridine
  modified_base 15: mod_base = OTHER; note = 2'O-methyl-cytidine
  modified_base 16: mod_base = OTHER; note = 2' Fluoro-uridine
  modified_base 17: mod_base = OTHER; note = 2'O-methyl-cytidine
  modified_base 18: mod_base = OTHER; note = 2'O-methyl-adenosine
  modified_base 19: mod_base = OTHER; note = 2'O-methyl-uridine
  modified_base 20: mod_base = OTHER; note = 2'O-methyl-adenosine
  modified_base 21: mod_base = OTHER; note = 2'O-methyl-cytidine
  modified_base 22: mod_base = OTHER; note = 2'O-methyl-uridine
  modified_base 23: mod_base = OTHER; note = 2'O-methyl-uridine
  modified_base 1..2: mod_base = OTHER; note = phosphorothioate linkage
  modified_base 2..3: mod_base = OTHER; note = phosphorothioate linkage
  modified_base 21..22: mod_base = OTHER; note = phosphorothioate linkage
  modified_base 22..23: mod_base = OTHER; note = phosphorothioate linkage
  source 1..23: mol_type = other RNA
agcagctcatgcatctcatactt

SEQ ID NO: 268 - RNA, 23 nt, synthetic construct
  misc_feature 1..23: note = Description of origin: ZPI siRNA antisense strands
  misc_feature 1..23: note = Description of source:Antisense strand ID:
  modified_base 1: mod_base = OTHER; note = 2'O-methyl-uridine
  modified_base 2: mod_base = OTHER; note = 2' Fluoro-cytidine
  modified_base 3: mod_base = OTHER; note = 2'O-methyl-adenosine
  modified_base 4: mod_base = OTHER; note = 2' Fluoro-guanosine
  modified_base 5: mod_base = OTHER; note = 2'O-methyl-guanosine
  modified_base 6: mod_base = OTHER; note = 2'Fluoro-adenosine
  modified_base 7: mod_base = OTHER; note = 2'O-methyl-uridine
  modified_base 8: mod_base = OTHER; note = 2'O-methyl-uridine
  modified_base 9: mod_base = OTHER; note = 2'O-methyl-adenosine
  modified_base 10: mod_base = OTHER; note = 2'O-methyl-adenosine
  modified_base 11: mod_base = OTHER; note = 2'O-methyl-uridine
  modified_base 12: mod_base = OTHER; note = 2'O-methyl-cytidine
  modified_base 13: mod_base = OTHER; note = 2'O-methyl-uridine
  modified_base 14: mod_base = OTHER; note = 2' Fluoro-cytidine
  modified_base 15: mod_base = OTHER; note = 2'O-methyl-adenosine
  modified_base 16: mod_base = OTHER; note = 2' Fluoro-uridine
  modified_base 17: mod_base = OTHER; note = 2'O-methyl-cytidine
  modified_base 18: mod_base = OTHER; note = 2'O-methyl-adenosine
  modified_base 19: mod_base = OTHER; note = 2'O-methyl-adenosine
  modified_base 20: mod_base = OTHER; note = 2'O-methyl-adenosine
  modified_base 21: mod_base = OTHER; note = 2'O-methyl-cytidine
  modified_base 22: mod_base = OTHER; note = 2'O-methyl-adenosine
  modified_base 23: mod_base = OTHER; note = 2'O-methyl-guanosine
  modified_base 1..2: mod_base = OTHER; note = phosphorothioate linkage
  modified_base 2..3: mod_base = OTHER; note = phosphorothioate linkage
  modified_base 21..22: mod_base = OTHER; note = phosphorothioate linkage
  modified_base 22..23: mod_base = OTHER; note = phosphorothioate linkage
  source 1..23: mol_type = other RNA
tcaggattaatctcatcaaacag

SEQ ID NO: 269 - RNA, 23 nt, synthetic construct
  misc_feature 1..23: note = Description of origin: ZPI siRNA antisense strands
  misc_feature 1..23: note = Description of source:Antisense strand ID:
  modified_base 1: mod_base = OTHER; note = 2'O-methyl-uridine
  modified_base 2: mod_base = OTHER; note = 2' Fluoro-uridine
  modified_base 3: mod_base = OTHER; note = 2'O-methyl-guanosine
  modified_base 4: mod_base = OTHER; note = 2' Fluoro-guanosine
  modified_base 5: mod_base = OTHER; note = 2'O-methyl-uridine
  modified_base 6: mod_base = OTHER; note = 2' Fluoro-uridine
  modified_base 7: mod_base = OTHER; note = 2'O-methyl-uridine
  modified_base 8: mod_base = OTHER; note = 2'O-methyl-cytidine
  modified_base 9: mod_base = OTHER; note = 2'O-methyl-adenosine
  modified_base 10: mod_base = OTHER; note = 2'O-methyl-guanosine
  modified_base 11: mod_base = OTHER; note = 2'O-methyl-guanosine
  modified_base 12: mod_base = OTHER; note = 2'O-methyl-adenosine
  modified_base 13: mod_base = OTHER; note = 2'O-methyl-uridine
  modified_base 14: mod_base = OTHER; note = 2' Fluoro-uridine
  modified_base 15: mod_base = OTHER; note = 2'O-methyl-adenosine
  modified_base 16: mod_base = OTHER; note = 2'Fluoro-adenosine
  modified_base 17: mod_base = OTHER; note = 2'O-methyl-uridine
  modified_base 18: mod_base = OTHER; note = 2'O-methyl-cytidine
  modified_base 19: mod_base = OTHER; note = 2'O-methyl-uridine
  modified_base 20: mod_base = OTHER; note = 2'O-methyl-cytidine
  modified_base 21: mod_base = OTHER; note = 2'O-methyl-adenosine
  modified_base 22: mod_base = OTHER; note = 2'O-methyl-uridine
  modified_base 23: mod_base = OTHER; note = 2'O-methyl-cytidine
  modified_base 1..2: mod_base = OTHER; note = phosphorothioate linkage
  modified_base 2..3: mod_base = OTHER; note = phosphorothioate linkage
  modified_base 21..22: mod_base = OTHER; note = phosphorothioate linkage
  modified_base 22..23: mod_base = OTHER; note = phosphorothioate linkage
  source 1..23: mol_type = other RNA
ttggtttcaggattaatctcatc

SEQ ID NO: 270 - RNA, 23 nt, synthetic construct
  misc_feature 1..23: note = Description of origin: ZPI siRNA antisense strands
  misc_feature 1..23: note = Description of source:Antisense strand ID:
  modified_base 1: mod_base = OTHER; note = 2'O-methyl-guanosine
  modified_base 2: mod_base = OTHER; note = 2' Fluoro-uridine
  modified_base 3: mod_base = OTHER; note = 2'O-methyl-uridine
  modified_base 4: mod_base = OTHER; note = 2' Fluoro-uridine
  modified_base 5: mod_base = OTHER; note = 2'O-methyl-cytidine
  modified_base 6: mod_base = OTHER; note = 2'Fluoro-adenosine
  modified_base 7: mod_base = OTHER; note = 2'O-methyl-guanosine
  modified_base 8: mod_base = OTHER; note = 2'O-methyl-guanosine
  modified_base 9: mod_base = OTHER; note = 2'O-methyl-adenosine
  modified_base 10: mod_base = OTHER; note = 2'O-methyl-uridine
  modified_base 11: mod_base = OTHER; note = 2'O-methyl-uridine
  modified_base 12: mod_base = OTHER; note = 2'O-methyl-adenosine
  modified_base 13: mod_base = OTHER; note = 2'O-methyl-adenosine
  modified_base 14: mod_base = OTHER; note = 2' Fluoro-uridine
  modified_base 15: mod_base = OTHER; note = 2'O-methyl-cytidine
  modified_base 16: mod_base = OTHER; note = 2' Fluoro-uridine
  modified_base 17: mod_base = OTHER; note = 2'O-methyl-cytidine
  modified_base 18: mod_base = OTHER; note = 2'O-methyl-adenosine
  modified_base 19: mod_base = OTHER; note = 2'O-methyl-uridine
  modified_base 20: mod_base = OTHER; note = 2'O-methyl-cytidine
  modified_base 21: mod_base = OTHER; note = 2'O-methyl-adenosine
  modified_base 22: mod_base = OTHER; note = 2'O-methyl-adenosine
  modified_base 23: mod_base = OTHER; note = 2'O-methyl-adenosine
  modified_base 1..2: mod_base = OTHER; note = phosphorothioate linkage
  modified_base 2..3: mod_base = OTHER; note = phosphorothioate linkage
  modified_base 21..22: mod_base = OTHER; note = phosphorothioate linkage
  modified_base 22..23: mod_base = OTHER; note = phosphorothioate linkage
  source 1..23: mol_type = other RNA
gtttcaggattaatctcatcaaa

SEQ ID NO: 271 - RNA, 23 nt, synthetic construct
  misc_feature 1..23: note = Description of origin: ZPI siRNA antisense strands
  misc_feature 1..23: note = Description of source:Antisense strand ID:
  modified_base 1: mod_base = OTHER; note = 2'O-methyl-uridine
  modified_base 2: mod_base = OTHER; note = 2' Fluoro-guanosine
  modified_base 3: mod_base = OTHER; note = 2'O-methyl-guanosine
  modified_base 4: mod_base = OTHER; note = 2' Fluoro-uridine
  modified_base 5: mod_base = OTHER; note = 2'O-methyl-uridine
  modified_base 6: mod_base = OTHER; note = 2' Fluoro-uridine
  modified_base 7: mod_base = OTHER; note = 2'O-methyl-cytidine
  modified_base 8: mod_base = OTHER; note = 2'O-methyl-adenosine
  modified_base 9: mod_base = OTHER; note = 2'O-methyl-guanosine
  modified_base 10: mod_base = OTHER; note = 2'O-methyl-guanosine
  modified_base 11: mod_base = OTHER; note = 2'O-methyl-adenosine
  modified_base 12: mod_base = OTHER; note = 2'O-methyl-uridine
  modified_base 13: mod_base = OTHER; note = 2'O-methyl-uridine
  modified_base 14: mod_base = OTHER; note = 2'Fluoro-adenosine
  modified_base 15: mod_base = OTHER; note = 2'O-methyl-adenosine
  modified_base 16: mod_base = OTHER; note = 2' Fluoro-uridine
  modified_base 17: mod_base = OTHER; note = 2'O-methyl-cytidine
  modified_base 18: mod_base = OTHER; note = 2'O-methyl-uridine
  modified_base 19: mod_base = OTHER; note = 2'O-methyl-cytidine
  modified_base 20: mod_base = OTHER; note = 2'O-methyl-adenosine
  modified_base 21: mod_base = OTHER; note = 2'O-methyl-uridine
  modified_base 22: mod_base = OTHER; note = 2'O-methyl-cytidine
  modified_base 23: mod_base = OTHER; note = 2'O-methyl-adenosine
  modified_base 1..2: mod_base = OTHER; note = phosphorothioate linkage
  modified_base 2..3: mod_base = OTHER; note = phosphorothioate linkage
  modified_base 21..22: mod_base = OTHER; note = phosphorothioate linkage
  modified_base 22..23: mod_base = OTHER; note = phosphorothioate linkage
  source 1..23: mol_type = other RNA
tggtttcaggattaatctcatca

SEQ ID NO: 272 - RNA, 23 nt, synthetic construct
  misc_feature 1..23: note = Description of origin: ZPI siRNA antisense strands
  misc_feature 1..23: note = Description of source:Antisense strand ID:
  modified_base 1: mod_base = OTHER; note = 2'O-methyl-guanosine
  modified_base 2: mod_base = OTHER; note = 2' Fluoro-guanosine
  modified_base 3: mod_base = OTHER; note = 2'O-methyl-uridine
  modified_base 4: mod_base = OTHER; note = 2' Fluoro-uridine
  modified_base 5: mod_base = OTHER; note = 2'O-methyl-uridine
  modified_base 6: mod_base = OTHER; note = 2' Fluoro-cytidine
  modified_base 7: mod_base = OTHER; note = 2'O-methyl-adenosine
  modified_base 8: mod_base = OTHER; note = 2'O-methyl-guanosine
  modified_base 9: mod_base = OTHER; note = 2'O-methyl-guanosine
  modified_base 10: mod_base = OTHER; note = 2'O-methyl-adenosine
  modified_base 11: mod_base = OTHER; note = 2'O-methyl-uridine
  modified_base 12: mod_base = OTHER; note = 2'O-methyl-uridine
  modified_base 13: mod_base = OTHER; note = 2'O-methyl-adenosine
  modified_base 14: mod_base = OTHER; note = 2'Fluoro-adenosine
  modified_base 15: mod_base = OTHER; note = 2'O-methyl-uridine
  modified_base 16: mod_base = OTHER; note = 2' Fluoro-cytidine
  modified_base 17: mod_base = OTHER; note = 2'O-methyl-uridine
  modified_base 18: mod_base = OTHER; note = 2'O-methyl-cytidine
  modified_base 19: mod_base = OTHER; note = 2'O-methyl-adenosine
  modified_base 20: mod_base = OTHER; note = 2'O-methyl-uridine
  modified_base 21: mod_base = OTHER; note = 2'O-methyl-cytidine
  modified_base 22: mod_base = OTHER; note = 2'O-methyl-adenosine
  modified_base 23: mod_base = OTHER; note = 2'O-methyl-adenosine
  modified_base 1..2: mod_base = OTHER; note = phosphorothioate linkage
  modified_base 2..3: mod_base = OTHER; note = phosphorothioate linkage
  modified_base 21..22: mod_base = OTHER; note = phosphorothioate linkage
  modified_base 22..23: mod_base = OTHER; note = phosphorothioate linkage
  source 1..23: mol_type = other RNA
ggtttcaggattaatctcatcaa

SEQ ID NO: 273 - RNA, 23 nt, synthetic construct
  misc_feature 1..23: note = Description of origin: ZPI siRNA antisense strands
  misc_feature 1..23: note = Description of source:Antisense strand ID:
  modified_base 1: mod_base = OTHER; note = 2'O-methyl-adenosine
  modified_base 2: mod_base = OTHER; note = 2' Fluoro-guanosine
  modified_base 3: mod_base = OTHER; note = 2'O-methyl-guanosine
  modified_base 4: mod_base = OTHER; note = 2'Fluoro-adenosine
  modified_base 5: mod_base = OTHER; note = 2'O-methyl-uridine
  modified_base 6: mod_base = OTHER; note = 2' Fluoro-uridine
  modified_base 7: mod_base = OTHER; note = 2'O-methyl-adenosine
  modified_base 8: mod_base = OTHER; note = 2'O-methyl-adenosine
  modified_base 9: mod_base = OTHER; note = 2'O-methyl-uridine
  modified_base 10: mod_base = OTHER; note = 2'O-methyl-cytidine
  modified_base 11: mod_base = OTHER; note = 2'O-methyl-uridine
  modified_base 12: mod_base = OTHER; note = 2'O-methyl-cytidine
  modified_base 13: mod_base = OTHER; note = 2'O-methyl-adenosine
  modified_base 14: mod_base = OTHER; note = 2' Fluoro-uridine
  modified_base 15: mod_base = OTHER; note = 2'O-methyl-cytidine
  modified_base 16: mod_base = OTHER; note = 2'Fluoro-adenosine
  modified_base 17: mod_base = OTHER; note = 2'O-methyl-adenosine
  modified_base 18: mod_base = OTHER; note = 2'O-methyl-adenosine
  modified_base 19: mod_base = OTHER; note = 2'O-methyl-cytidine
  modified_base 20: mod_base = OTHER; note = 2'O-methyl-adenosine
  modified_base 21: mod_base = OTHER; note = 2'O-methyl-guanosine
  modified_base 22: mod_base = OTHER; note = 2'O-methyl-uridine
  modified_base 23: mod_base = OTHER; note = 2'O-methyl-uridine
  modified_base 1..2: mod_base = OTHER; note = phosphorothioate linkage
  modified_base 2..3: mod_base = OTHER; note = phosphorothioate linkage
  modified_base 21..22: mod_base = OTHER; note = phosphorothioate linkage
  modified_base 22..23: mod_base = OTHER; note = phosphorothioate linkage
  source 1..23: mol_type = other RNA
aggattaatctcatcaaacagtt

SEQ ID NO: 274 - RNA, 23 nt, synthetic construct
  misc_feature 1..23: note = Description of origin: ZPI siRNA antisense strands
  misc_feature 1..23: note = Description of source:Antisense strand ID:
  modified_base 1: mod_base = OTHER; note = 2'O-methyl-uridine
  modified_base 2: mod_base = OTHER; note = 2' Fluoro-cytidine
  modified_base 3: mod_base = OTHER; note = 2'O-methyl-cytidine
  modified_base 4: mod_base = OTHER; note = 2' Fluoro-uridine
  modified_base 5: mod_base = OTHER; note = 2'O-methyl-uridine
  modified_base 6: mod_base = OTHER; note = 2' Fluoro-guanosine
  modified_base 7: mod_base = OTHER; note = 2'O-methyl-uridine
  modified_base 8: mod_base = OTHER; note = 2'O-methyl-guanosine
  modified_base 9: mod_base = OTHER; note = 2'O-methyl-guanosine
  modified_base 10: mod_base = OTHER; note = 2'O-methyl-adenosine
  modified_base 11: mod_base = OTHER; note = 2'O-methyl-uridine
  modified_base 12: mod_base = OTHER; note = 2'O-methyl-guanosine
  modified_base 13: mod_base = OTHER; note = 2'O-methyl-adenosine
  modified_base 14: mod_base = OTHER; note = 2'Fluoro-adenosine
  modified_base 15: mod_base = OTHER; note = 2'O-methyl-guanosine
  modified_base 16: mod_base = OTHER; note = 2' Fluoro-guanosine
  modified_base 17: mod_base = OTHER; note = 2'O-methyl-cytidine
  modified_base 18: mod_base = OTHER; note = 2'O-methyl-adenosine
  modified_base 19: mod_base = OTHER; note = 2'O-methyl-adenosine
  modified_base 20: mod_base = OTHER; note = 2'O-methyl-adenosine
  modified_base 21: mod_base = OTHER; note = 2'O-methyl-adenosine
  modified_base 22: mod_base = OTHER; note = 2'O-methyl-cytidine
  modified_base 23: mod_base = OTHER; note = 2'O-methyl-uridine
  modified_base 1..2: mod_base = OTHER; note = phosphorothioate linkage
  modified_base 2..3: mod_base = OTHER; note = phosphorothioate linkage
  modified_base 21..22: mod_base = OTHER; note = phosphorothioate linkage
  modified_base 22..23: mod_base = OTHER; note = phosphorothioate linkage
  source 1..23: mol_type = other RNA
tccttgtggatgaaggcaaaact

SEQ ID NO: 275 - RNA, 23 nt, synthetic construct
  misc_feature 1..23: note = Description of origin: ZPI siRNA antisense strands
  misc_feature 1..23: note = Description of source:Antisense strand ID:
  modified_base 1: mod_base = OTHER; note = 2'O-methyl-guanosine
  modified_base 2: mod_base = OTHER; note = 2' Fluoro-uridine
  modified_base 3: mod_base = OTHER; note = 2'O-methyl-guanosine
  modified_base 4: mod_base = OTHER; note = 2' Fluoro-cytidine
  modified_base 5: mod_base = OTHER; note = 2'O-methyl-cytidine
  modified_base 6: mod_base = OTHER; note = 2' Fluoro-uridine
  modified_base 7: mod_base = OTHER; note = 2'O-methyl-cytidine
  modified_base 8: mod_base = OTHER; note = 2'O-methyl-adenosine
  modified_base 9: mod_base = OTHER; note = 2'O-methyl-uridine
  modified_base 10: mod_base = OTHER; note = 2'O-methyl-guanosine
  modified_base 11: mod_base = OTHER; note = 2'O-methyl-guanosine
  modified_base 12: mod_base = OTHER; note = 2'O-methyl-adenosine
  modified_base 13: mod_base = OTHER; note = 2'O-methyl-guanosine
  modified_base 14: mod_base = OTHER; note = 2'Fluoro-adenosine
  modified_base 15: mod_base = OTHER; note = 2'O-methyl-uridine
  modified_base 16: mod_base = OTHER; note = 2' Fluoro-cytidine
  modified_base 17: mod_base = OTHER; note = 2'O-methyl-uridine
  modified_base 18: mod_base = OTHER; note = 2'O-methyl-uridine
  modified_base 19: mod_base = OTHER; note = 2'O-methyl-uridine
  modified_base 20: mod_base = OTHER; note = 2'O-methyl-cytidine
  modified_base 21: mod_base = OTHER; note = 2'O-methyl-guanosine
  modified_base 22: mod_base = OTHER; note = 2'O-methyl-cytidine
  modified_base 23: mod_base = OTHER; note = 2'O-methyl-adenosine
  modified_base 1..2: mod_base = OTHER; note = phosphorothioate linkage
  modified_base 2..3: mod_base = OTHER; note = phosphorothioate linkage
  modified_base 21..22: mod_base = OTHER; note = phosphorothioate linkage
  modified_base 22..23: mod_base = OTHER; note = phosphorothioate linkage
  source 1..23: mol_type = other RNA
gtgcctcatggagatctttcgca

SEQ ID NO: 276 - RNA, 23 nt, synthetic construct
  misc_feature 1..23: note = Description of origin: ZPI siRNA antisense strands
  misc_feature 1..23: note = Description of source:Antisense strand ID:
  modified_base 1: mod_base = OTHER; note = 2'O-methyl-uridine
  modified_base 2: mod_base = OTHER; note = 2' Fluoro-cytidine
  modified_base 3: mod_base = OTHER; note = 2'O-methyl-uridine
  modified_base 4: mod_base = OTHER; note = 2' Fluoro-cytidine
  modified_base 5: mod_base = OTHER; note = 2'O-methyl-cytidine
  modified_base 6: mod_base = OTHER; note = 2'Fluoro-adenosine
  modified_base 7: mod_base = OTHER; note = 2'O-methyl-uridine
  modified_base 8: mod_base = OTHER; note = 2'O-methyl-guanosine
  modified_base 9: mod_base = OTHER; note = 2'O-methyl-adenosine
  modified_base 10: mod_base = OTHER; note = 2'O-methyl-guanosine
  modified_base 11: mod_base = OTHER; note = 2'O-methyl-guanosine
  modified_base 12: mod_base = OTHER; note = 2'O-methyl-adenosine
  modified_base 13: mod_base = OTHER; note = 2'O-methyl-cytidine
  modified_base 14: mod_base = OTHER; note = 2' Fluoro-cytidine
  modified_base 15: mod_base = OTHER; note = 2'O-methyl-adenosine
  modified_base 16: mod_base = OTHER; note = 2' Fluoro-cytidine
  modified_base 17: mod_base = OTHER; note = 2'O-methyl-cytidine
  modified_base 18: mod_base = OTHER; note = 2'O-methyl-adenosine
  modified_base 19: mod_base = OTHER; note = 2'O-methyl-guanosine
  modified_base 20: mod_base = OTHER; note = 2'O-methyl-cytidine
  modified_base 21: mod_base = OTHER; note = 2'O-methyl-adenosine
  modified_base 22: mod_base = OTHER; note = 2'O-methyl-uridine
  modified_base 23: mod_base = OTHER; note = 2'O-methyl-guanosine
  modified_base 1..2: mod_base = OTHER; note = phosphorothioate linkage
  modified_base 2..3: mod_base = OTHER; note = phosphorothioate linkage
  modified_base 21..22: mod_base = OTHER; note = phosphorothioate linkage
  modified_base 22..23: mod_base = OTHER; note = phosphorothioate linkage
  source 1..23: mol_type = other RNA
tctccatgaggaccaccagcatg

SEQ ID NO: 277 - RNA, 23 nt, synthetic construct
  misc_feature 1..23: note = Description of origin: ZPI siRNA antisense strands
  misc_feature 1..23: note = Description of source:Antisense strand ID:
  modified_base 1: mod_base = OTHER; note = 2'O-methyl-cytidine
  modified_base 2: mod_base = OTHER; note = 2'Fluoro-adenosine
  modified_base 3: mod_base = OTHER; note = 2'O-methyl-adenosine
  modified_base 4: mod_base = OTHER; note = 2'Fluoro-adenosine
  modified_base 5: mod_base = OTHER; note = 2'O-methyl-adenosine
  modified_base 6: mod_base = OTHER; note = 2' Fluoro-uridine
  modified_base 7: mod_base = OTHER; note = 2'O-methyl-cytidine
  modified_base 8: mod_base = OTHER; note = 2'O-methyl-cytidine
  modified_base 9: mod_base = OTHER; note = 2'O-methyl-uridine
  modified_base 10: mod_base = OTHER; note = 2'O-methyl-uridine
  modified_base 11: mod_base = OTHER; note = 2'O-methyl-guanosine
  modified_base 12: mod_base = OTHER; note = 2'O-methyl-uridine
  modified_base 13: mod_base = OTHER; note = 2'O-methyl-guanosine
  modified_base 14: mod_base = OTHER; note = 2' Fluoro-guanosine
  modified_base 15: mod_base = OTHER; note = 2'O-methyl-adenosine
  modified_base 16: mod_base = OTHER; note = 2' Fluoro-uridine
  modified_base 17: mod_base = OTHER; note = 2'O-methyl-guanosine
  modified_base 18: mod_base = OTHER; note = 2'O-methyl-adenosine
  modified_base 19: mod_base = OTHER; note = 2'O-methyl-adenosine
  modified_base 20: mod_base = OTHER; note = 2'O-methyl-guanosine
  modified_base 21: mod_base = OTHER; note = 2'O-methyl-guanosine
  modified_base 22: mod_base = OTHER; note = 2'O-methyl-cytidine
  modified_base 23: mod_base = OTHER; note = 2'O-methyl-adenosine
  modified_base 1..2: mod_base = OTHER; note = phosphorothioate linkage
  modified_base 2..3: mod_base = OTHER; note = phosphorothioate linkage
  modified_base 21..22: mod_base = OTHER; note = phosphorothioate linkage
  modified_base 22..23: mod_base = OTHER; note = phosphorothioate linkage
  source 1..23: mol_type = other RNA
caaaatccttgtggatgaaggca

SEQ ID NO: 278 - RNA, 23 nt, synthetic construct
  misc_feature 1..23: note = Description of origin: ZPI siRNA antisense strands
  misc_feature 1..23: note = Description of source:Antisense strand ID:
  modified_base 1: mod_base = OTHER; note = 2'O-methyl-cytidine
  modified_base 2: mod_base = OTHER; note = 2' Fluoro-guanosine
  modified_base 3: mod_base = OTHER; note = 2'O-methyl-uridine
  modified_base 4: mod_base = OTHER; note = 2' Fluoro-guanosine
  modified_base 5: mod_base = OTHER; note = 2'O-methyl-cytidine
  modified_base 6: mod_base = OTHER; note = 2' Fluoro-cytidine
  modified_base 7: mod_base = OTHER; note = 2'O-methyl-uridine
  modified_base 8: mod_base = OTHER; note = 2'O-methyl-cytidine
  modified_base 9: mod_base = OTHER; note = 2'O-methyl-adenosine
  modified_base 10: mod_base = OTHER; note = 2'O-methyl-uridine
  modified_base 11: mod_base = OTHER; note = 2'O-methyl-guanosine
  modified_base 12: mod_base = OTHER; note = 2'O-methyl-guanosine
  modified_base 13: mod_base = OTHER; note = 2'O-methyl-adenosine
  modified_base 14: mod_base = OTHER; note = 2' Fluoro-guanosine
  modified_base 15: mod_base = OTHER; note = 2'O-methyl-adenosine
  modified_base 16: mod_base = OTHER; note = 2' Fluoro-uridine
  modified_base 17: mod_base = OTHER; note = 2'O-methyl-cytidine
  modified_base 18: mod_base = OTHER; note = 2'O-methyl-uridine
  modified_base 19: mod_base = OTHER; note = 2'O-methyl-uridine
  modified_base 20: mod_base = OTHER; note = 2'O-methyl-uridine
  modified_base 21: mod_base = OTHER; note = 2'O-methyl-cytidine
  modified_base 22: mod_base = OTHER; note = 2'O-methyl-guanosine
  modified_base 23: mod_base = OTHER; note = 2'O-methyl-cytidine
  modified_base 1..2: mod_base = OTHER; note = phosphorothioate linkage
  modified_base 2..3: mod_base = OTHER; note = phosphorothioate linkage
  modified_base 21..22: mod_base = OTHER; note = phosphorothioate linkage
  modified_base 22..23: mod_base = OTHER; note = phosphorothioate linkage
  source 1..23: mol_type = other RNA
cgtgcctcatggagatctttcgc

SEQ ID NO: 279 - RNA, 23 nt, synthetic construct
  misc_feature 1..23: note = Description of origin: ZPI siRNA antisense strands
  misc_feature 1..23: note = Description of source:Antisense strand ID:
  modified_base 1: mod_base = OTHER; note = 2'O-methyl-adenosine
  modified_base 2: mod_base = OTHER; note = 2' Fluoro-uridine
  modified_base 3: mod_base = OTHER; note = 2'O-methyl-cytidine
  modified_base 4: mod_base = OTHER; note = 2'Fluoro-adenosine
  modified_base 5: mod_base = OTHER; note = 2'O-methyl-adenosine
  modified_base 6: mod_base = OTHER; note = 2'Fluoro-adenosine
  modified_base 7: mod_base = OTHER; note = 2'O-methyl-adenosine
  modified_base 8: mod_base = OTHER; note = 2'O-methyl-uridine
  modified_base 9: mod_base = OTHER; note = 2'O-methyl-cytidine
  modified_base 10: mod_base = OTHER; note = 2'O-methyl-cytidine
  modified_base 11: mod_base = OTHER; note = 2'O-methyl-uridine
  modified_base 12: mod_base = OTHER; note = 2'O-methyl-uridine
  modified_base 13: mod_base = OTHER; note = 2'O-methyl-guanosine
  modified_base 14: mod_base = OTHER; note = 2' Fluoro-uridine
  modified_base 15: mod_base = OTHER; note = 2'O-methyl-guanosine
  modified_base 16: mod_base = OTHER; note = 2' Fluoro-guanosine
  modified_base 17: mod_base = OTHER; note = 2'O-methyl-adenosine
  modified_base 18: mod_base = OTHER; note = 2'O-methyl-uridine
  modified_base 19: mod_base = OTHER; note = 2'O-methyl-guanosine
  modified_base 20: mod_base = OTHER; note = 2'O-methyl-adenosine
  modified_base 21: mod_base = OTHER; note = 2'O-methyl-adenosine
  modified_base 22: mod_base = OTHER; note = 2'O-methyl-guanosine
  modified_base 23: mod_base = OTHER; note = 2'O-methyl-guanosine
  modified_base 1..2: mod_base = OTHER; note = phosphorothioate linkage
  modified_base 2..3: mod_base = OTHER; note = phosphorothioate linkage
  modified_base 21..22: mod_base = OTHER; note = phosphorothioate linkage
  modified_base 22..23: mod_base = OTHER; note = phosphorothioate linkage
  source 1..23: mol_type = other RNA
atcaaaatccttgtggatgaagg

SEQ ID NO: 280 - RNA, 23 nt, synthetic construct
  misc_feature 1..23: note = Description of origin: ZPI siRNA antisense strands
  misc_feature 1..23: note = Description of source:Antisense strand ID:
  modified_base 1: mod_base = OTHER; note = 2'O-methyl-uridine
  modified_base 2: mod_base = OTHER; note = 2' Fluoro-uridine
  modified_base 3: mod_base = OTHER; note = 2'O-methyl-cytidine
  modified_base 4: mod_base = OTHER; note = 2'Fluoro-adenosine
  modified_base 5: mod_base = OTHER; note = 2'O-methyl-guanosine
  modified_base 6: mod_base = OTHER; note = 2' Fluoro-guanosine
  modified_base 7: mod_base = OTHER; note = 2'O-methyl-adenosine
  modified_base 8: mod_base = OTHER; note = 2'O-methyl-uridine
  modified_base 9: mod_base = OTHER; note = 2'O-methyl-uridine
  modified_base 10: mod_base = OTHER; note = 2'O-methyl-adenosine
  modified_base 11: mod_base = OTHER; note = 2'O-methyl-adenosine
  modified_base 12: mod_base = OTHER; note = 2'O-methyl-uridine
  modified_base 13: mod_base = OTHER; note = 2'O-methyl-cytidine
  modified_base 14: mod_base = OTHER; note = 2' Fluoro-uridine
  modified_base 15: mod_base = OTHER; note = 2'O-methyl-cytidine
  modified_base 16: mod_base = OTHER; note = 2'Fluoro-adenosine
  modified_base 17: mod_base = OTHER; note = 2'O-methyl-uridine
  modified_base 18: mod_base = OTHER; note = 2'O-methyl-cytidine
  modified_base 19: mod_base = OTHER; note = 2'O-methyl-adenosine
  modified_base 20: mod_base = OTHER; note = 2'O-methyl-adenosine
  modified_base 21: mod_base = OTHER; note = 2'O-methyl-adenosine
  modified_base 22: mod_base = OTHER; note = 2'O-methyl-cytidine
  modified_base 23: mod_base = OTHER; note = 2'O-methyl-adenosine
  modified_base 1..2: mod_base = OTHER; note = phosphorothioate linkage
  modified_base 2..3: mod_base = OTHER; note = phosphorothioate linkage
  modified_base 21..22: mod_base = OTHER; note = phosphorothioate linkage
  modified_base 22..23: mod_base = OTHER; note = phosphorothioate linkage
  source 1..23: mol_type = other RNA
ttcaggattaatctcatcaaaca

SEQ ID NO: 281 - RNA, 23 nt, synthetic construct
  misc_feature 1..23: note = Description of origin: ZPI siRNA antisense strands
  misc_feature 1..23: note = Description of source:Antisense strand ID:
  modified_base 1: mod_base = OTHER; note = 2'O-methyl-adenosine
  modified_base 2: mod_base = OTHER; note = 2'Fluoro-adenosine
  modified_base 3: mod_base = OTHER; note = 2'O-methyl-uridine
  modified_base 4: mod_base = OTHER; note = 2' Fluoro-cytidine
  modified_base 5: mod_base = OTHER; note = 2'O-methyl-cytidine
  modified_base 6: mod_base = OTHER; note = 2' Fluoro-uridine
  modified_base 7: mod_base = OTHER; note = 2'O-methyl-uridine
  modified_base 8: mod_base = OTHER; note = 2'O-methyl-guanosine
  modified_base 9: mod_base = OTHER; note = 2'O-methyl-uridine
  modified_base 10: mod_base = OTHER; note = 2'O-methyl-guanosine
  modified_base 11: mod_base = OTHER; note = 2'O-methyl-guanosine
  modified_base 12: mod_base = OTHER; note = 2'O-methyl-adenosine
  modified_base 13: mod_base = OTHER; note = 2'O-methyl-uridine
  modified_base 14: mod_base = OTHER; note = 2' Fluoro-guanosine
  modified_base 15: mod_base = OTHER; note = 2'O-methyl-adenosine
  modified_base 16: mod_base = OTHER; note = 2'Fluoro-adenosine
  modified_base 17: mod_base = OTHER; note = 2'O-methyl-guanosine
  modified_base 18: mod_base = OTHER; note = 2'O-methyl-guanosine
  modified_base 19: mod_base = OTHER; note = 2'O-methyl-cytidine
  modified_base 20: mod_base = OTHER; note = 2'O-methyl-adenosine
  modified_base 21: mod_base = OTHER; note = 2'O-methyl-adenosine
  modified_base 22: mod_base = OTHER; note = 2'O-methyl-adenosine
  modified_base 23: mod_base = OTHER; note = 2'O-methyl-adenosine
  modified_base 1..2: mod_base = OTHER; note = phosphorothioate linkage
  modified_base 2..3: mod_base = OTHER; note = phosphorothioate linkage
  modified_base 21..22: mod_base = OTHER; note = phosphorothioate linkage
  modified_base 22..23: mod_base = OTHER; note = phosphorothioate linkage
  source 1..23: mol_type = other RNA
aatccttgtggatgaaggcaaaa

SEQ ID NO: 282 - RNA, 23 nt, synthetic construct
  misc_feature 1..23: note = Description of origin: ZPI siRNA antisense strands
  misc_feature 1..23: note = Description of source:Antisense strand ID:
  modified_base 1: mod_base = OTHER; note = 2'O-methyl-cytidine
  modified_base 2: mod_base = OTHER; note = 2' Fluoro-cytidine
  modified_base 3: mod_base = OTHER; note = 2'O-methyl-adenosine
  modified_base 4: mod_base = OTHER; note = 2' Fluoro-uridine
  modified_base 5: mod_base = OTHER; note = 2'O-methyl-cytidine
  modified_base 6: mod_base = OTHER; note = 2' Fluoro-guanosine
  modified_base 7: mod_base = OTHER; note = 2'O-methyl-uridine
  modified_base 8: mod_base = OTHER; note = 2'O-methyl-guanosine
  modified_base 9: mod_base = OTHER; note = 2'O-methyl-cytidine
  modified_base 10: mod_base = OTHER; note = 2'O-methyl-cytidine
  modified_base 11: mod_base = OTHER; note = 2'O-methyl-uridine
  modified_base 12: mod_base = OTHER; note = 2'O-methyl-cytidine
  modified_base 13: mod_base = OTHER; note = 2'O-methyl-adenosine
  modified_base 14: mod_base = OTHER; note = 2' Fluoro-uridine
  modified_base 15: mod_base = OTHER; note = 2'O-methyl-guanosine
  modified_base 16: mod_base = OTHER; note = 2' Fluoro-guanosine
  modified_base 17: mod_base = OTHER; note = 2'O-methyl-adenosine
  modified_base 18: mod_base = OTHER; note = 2'O-methyl-guanosine
  modified_base 19: mod_base = OTHER; note = 2'O-methyl-adenosine
  modified_base 20: mod_base = OTHER; note = 2'O-methyl-uridine
  modified_base 21: mod_base = OTHER; note = 2'O-methyl-cytidine
  modified_base 22: mod_base = OTHER; note = 2'O-methyl-uridine
  modified_base 23: mod_base = OTHER; note = 2'O-methyl-uridine
  modified_base 1..2: mod_base = OTHER; note = phosphorothioate linkage
  modified_base 2..3: mod_base = OTHER; note = phosphorothioate linkage
  modified_base 21..22: mod_base = OTHER; note = phosphorothioate linkage
  modified_base 22..23: mod_base = OTHER; note = phosphorothioate linkage
  source 1..23: mol_type = other RNA
ccatcgtgcctcatggagatctt

SEQ ID NO: 283 - RNA, 21 nt, synthetic construct
  misc_feature 1..21: note = Description of origin: HCII siRNA sense strands
  misc_feature 1..21: note = Description of source:Sense strand ID:
  modified_base 1: mod_base = OTHER; note = 2'O-methyl-uridine
  modified_base 2: mod_base = OTHER; note = 2'O-methyl-guanosine
  modified_base 3: mod_base = OTHER; note = 2'O-methyl-adenosine
  modified_base 4: mod_base = OTHER; note = 2'O-methyl-adenosine
  modified_base 5: mod_base = OTHER; note = 2'O-methyl-uridine
  modified_base 6: mod_base = OTHER; note = 2'O-methyl-adenosine
  modified_base 7: mod_base = OTHER; note = 2'Fluoro-adenosine
  modified_base 8: mod_base = OTHER; note = 2'Fluoro-adenosine
  modified_base 9: mod_base = OTHER; note = 2' Fluoro-uridine
  modified_base 10: mod_base = OTHER; note = 2' Fluoro-uridine
  modified_base 11: mod_base = OTHER; note = 2' Fluoro-cytidine
  modified_base 12: mod_base = OTHER; note = 2'O-methyl-cytidine
  modified_base 13: mod_base = OTHER; note = 2'O-methyl-cytidine
  modified_base 14: mod_base = OTHER; note = 2'O-methyl-adenosine
  modified_base 15: mod_base = OTHER; note = 2'O-methyl-guanosine
  modified_base 16: mod_base = OTHER; note = 2'O-methyl-uridine
  modified_base 17: mod_base = OTHER; note = 2'O-methyl-guanosine
  modified_base 18: mod_base = OTHER; note = 2'O-methyl-guanosine
  modified_base 19: mod_base = OTHER; note = 2'Fluoro-adenosine
  modified_base 20: mod_base = OTHER; note = 2'O-methyl-adenosine
  modified_base 21: mod_base = OTHER; note = 2'O-methyl-adenosine
  modified_base 1..2: mod_base = OTHER; note = phosphorothioate linkage
  modified_base 2..3: mod_base = OTHER; note = phosphorothioate linkage
  source 1..21: mol_type = other RNA
tgaataaattcccagtggaaa

SEQ ID NO: 284 - RNA, 21 nt, synthetic construct
  misc_feature 1..21: note = Description of origin: HCII siRNA sense strands
  misc_feature 1..21: note = Description of source:Sense strand ID:
  modified_base 1: mod_base = OTHER; note = 2'O-methyl-cytidine
  modified_base 2: mod_base = OTHER; note = 2'O-methyl-uridine
  modified_base 3: mod_base = OTHER; note = 2'O-methyl-guanosine
  modified_base 4: mod_base = OTHER; note = 2'O-methyl-cytidine
  modified_base 5: mod_base = OTHER; note = 2'O-methyl-adenosine
  modified_base 6: mod_base = OTHER; note = 2'O-methyl-uridine
  modified_base 7: mod_base = OTHER; note = 2' Fluoro-cytidine
  modified_base 8: mod_base = OTHER; note = 2' Fluoro-uridine
  modified_base 9: mod_base = OTHER; note = 2'Fluoro-adenosine
  modified_base 10: mod_base = OTHER; note = 2' Fluoro-cytidine
  modified_base 11: mod_base = OTHER; note = 2' Fluoro-uridine
  modified_base 12: mod_base = OTHER; note = 2'O-methyl-uridine
  modified_base 13: mod_base = OTHER; note = 2'O-methyl-cytidine
  modified_base 14: mod_base = OTHER; note = 2'O-methyl-adenosine
  modified_base 15: mod_base = OTHER; note = 2'O-methyl-adenosine
  modified_base 16: mod_base = OTHER; note = 2'O-methyl-adenosine
  modified_base 17: mod_base = OTHER; note = 2'O-methyl-guanosine
  modified_base 18: mod_base = OTHER; note = 2'O-methyl-guanosine
  modified_base 19: mod_base = OTHER; note = 2'Fluoro-adenosine
  modified_base 20: mod_base = OTHER; note = 2'O-methyl-uridine
  modified_base 21: mod_base = OTHER; note = 2'O-methyl-cytidine
  modified_base 1..2: mod_base = OTHER; note = phosphorothioate linkage
  modified_base 2..3: mod_base = OTHER; note = phosphorothioate linkage
  source 1..21: mol_type = other RNA
ctgcatctacttcaaaggatc

SEQ ID NO: 285 - RNA, 21 nt, synthetic construct
  misc_feature 1..21: note = Description of origin: HCII siRNA sense strands
  misc_feature 1..21: note = Description of source:Sense strand ID:
  modified_base 1: mod_base = OTHER; note = 2'O-methyl-adenosine
  modified_base 2: mod_base = OTHER; note = 2'O-methyl-cytidine
  modified_base 3: mod_base = OTHER; note = 2'O-methyl-uridine
  modified_base 4: mod_base = OTHER; note = 2'O-methyl-guanosine
  modified_base 5: mod_base = OTHER; note = 2'O-methyl-cytidine
  modified_base 6: mod_base = OTHER; note = 2'O-methyl-adenosine
  modified_base 7: mod_base = OTHER; note = 2' Fluoro-uridine
  modified_base 8: mod_base = OTHER; note = 2' Fluoro-cytidine
  modified_base 9: mod_base = OTHER; note = 2' Fluoro-uridine
  modified_base 10: mod_base = OTHER; note = 2'Fluoro-adenosine
  modified_base 11: mod_base = OTHER; note = 2' Fluoro-cytidine
  modified_base 12: mod_base = OTHER; note = 2'O-methyl-uridine
  modified_base 13: mod_base = OTHER; note = 2'O-methyl-uridine
  modified_base 14: mod_base = OTHER; note = 2'O-methyl-cytidine
  modified_base 15: mod_base = OTHER; note = 2'O-methyl-adenosine
  modified_base 16: mod_base = OTHER; note = 2'O-methyl-adenosine
  modified_base 17: mod_base = OTHER; note = 2'O-methyl-adenosine
  modified_base 18: mod_base = OTHER; note = 2'O-methyl-guanosine
  modified_base 19: mod_base = OTHER; note = 2' Fluoro-guanosine
  modified_base 20: mod_base = OTHER; note = 2'O-methyl-adenosine
  modified_base 21: mod_base = OTHER; note = 2'O-methyl-uridine
  modified_base 1..2: mod_base = OTHER; note = phosphorothioate linkage
  modified_base 2..3: mod_base = OTHER; note = phosphorothioate linkage
  source 1..21: mol_type = other RNA
actgcatctacttcaaaggat

SEQ ID NO: 286 - RNA, 21 nt, synthetic construct
  misc_feature 1..21: note = Description of origin: HCII siRNA sense strands
  misc_feature 1..21: note = Description of source:Sense strand ID:
  modified_base 1: mod_base = OTHER; note = 2'O-methyl-guanosine
  modified_base 2: mod_base = OTHER; note = 2'O-methyl-guanosine
  modified_base 3: mod_base = OTHER; note = 2'O-methyl-guanosine
  modified_base 4: mod_base = OTHER; note = 2'O-methyl-adenosine
  modified_base 5: mod_base = OTHER; note = 2'O-methyl-guanosine
  modified_base 6: mod_base = OTHER; note = 2'O-methyl-adenosine
  modified_base 7: mod_base = OTHER; note = 2' Fluoro-guanosine
  modified_base 8: mod_base = OTHER; note = 2'Fluoro-adenosine
  modified_base 9: mod_base = OTHER; note = 2' Fluoro-cytidine
  modified_base 10: mod_base = OTHER; note = 2' Fluoro-cytidine
  modified_base 11: mod_base = OTHER; note = 2' Fluoro-cytidine
  modified_base 12: mod_base = OTHER; note = 2'O-methyl-adenosine
  modified_base 13: mod_base = OTHER; note = 2'O-methyl-uridine
  modified_base 14: mod_base = OTHER; note = 2'O-methyl-guanosine
  modified_base 15: mod_base = OTHER; note = 2'O-methyl-adenosine
  modified_base 16: mod_base = OTHER; note = 2'O-methyl-adenosine
  modified_base 17: mod_base = OTHER; note = 2'O-methyl-cytidine
  modified_base 18: mod_base = OTHER; note = 2'O-methyl-adenosine
  modified_base 19: mod_base = OTHER; note = 2'Fluoro-adenosine
  modified_base 20: mod_base = OTHER; note = 2'O-methyl-guanosine
  modified_base 21: mod_base = OTHER; note = 2'O-methyl-uridine
  modified_base 1..2: mod_base = OTHER; note = phosphorothioate linkage
  modified_base 2..3: mod_base = OTHER; note = phosphorothioate linkage
  source 1..21: mol_type = other RNA
gggagagacccatgaacaagt

SEQ ID NO: 287 - RNA, 21 nt, synthetic construct
  misc_feature 1..21: note = Description of origin: HCII siRNA sense strands
  misc_feature 1..21: note = Description of source:Sense strand ID:
  modified_base 1: mod_base = OTHER; note = 2'O-methyl-guanosine
  modified_base 2: mod_base = OTHER; note = 2'O-methyl-guanosine
  modified_base 3: mod_base = OTHER; note = 2'O-methyl-uridine
  modified_base 4: mod_base = OTHER; note = 2'O-methyl-guanosine
  modified_base 5: mod_base = OTHER; note = 2'O-methyl-adenosine
  modified_base 6: mod_base = OTHER; note = 2'O-methyl-adenosine
  modified_base 7: mod_base = OTHER; note = 2' Fluoro-uridine
  modified_base 8: mod_base = OTHER; note = 2'Fluoro-adenosine
  modified_base 9: mod_base = OTHER; note = 2'Fluoro-adenosine
  modified_base 10: mod_base = OTHER; note = 2'Fluoro-adenosine
  modified_base 11: mod_base = OTHER; note = 2' Fluoro-uridine
  modified_base 12: mod_base = OTHER; note = 2'O-methyl-uridine
  modified_base 13: mod_base = OTHER; note = 2'O-methyl-cytidine
  modified_base 14: mod_base = OTHER; note = 2'O-methyl-cytidine
  modified_base 15: mod_base = OTHER; note = 2'O-methyl-cytidine
  modified_base 16: mod_base = OTHER; note = 2'O-methyl-adenosine
  modified_base 17: mod_base = OTHER; note = 2'O-methyl-guanosine
  modified_base 18: mod_base = OTHER; note = 2'O-methyl-uridine
  modified_base 19: mod_base = OTHER; note = 2' Fluoro-guanosine
  modified_base 20: mod_base = OTHER; note = 2'O-methyl-guanosine
  modified_base 21: mod_base = OTHER; note = 2'O-methyl-adenosine
  modified_base 1..2: mod_base = OTHER; note = phosphorothioate linkage
  modified_base 2..3: mod_base = OTHER; note = phosphorothioate linkage
  source 1..21: mol_type = other RNA
ggtgaataaattcccagtgga

SEQ ID NO: 288 - RNA, 21 nt, synthetic construct
  misc_feature 1..21: note = Description of origin: HCII siRNA sense strands
  misc_feature 1..21: note = Description of source:Sense strand ID:
  modified_base 1: mod_base = OTHER; note = 2'O-methyl-uridine
  modified_base 2: mod_base = OTHER; note = 2'O-methyl-cytidine
  modified_base 3: mod_base = OTHER; note = 2'O-methyl-adenosine
  modified_base 4: mod_base = OTHER; note = 2'O-methyl-guanosine
  modified_base 5: mod_base = OTHER; note = 2'O-methyl-guanosine
  modified_base 6: mod_base = OTHER; note = 2'O-methyl-adenosine
  modified_base 7: mod_base = OTHER; note = 2' Fluoro-guanosine
  modified_base 8: mod_base = OTHER; note = 2' Fluoro-guanosine
  modified_base 9: mod_base = OTHER; note = 2'Fluoro-adenosine
  modified_base 10: mod_base = OTHER; note = 2'Fluoro-adenosine
  modified_base 11: mod_base = OTHER; note = 2' Fluoro-uridine
  modified_base 12: mod_base = OTHER; note = 2'O-methyl-uridine
  modified_base 13: mod_base = OTHER; note = 2'O-methyl-uridine
  modified_base 14: mod_base = OTHER; note = 2'O-methyl-uridine
  modified_base 15: mod_base = OTHER; note = 2'O-methyl-guanosine
  modified_base 16: mod_base = OTHER; note = 2'O-methyl-guanosine
  modified_base 17: mod_base = OTHER; note = 2'O-methyl-guanosine
  modified_base 18: mod_base = OTHER; note = 2'O-methyl-uridine
  modified_base 19: mod_base = OTHER; note = 2'Fluoro-adenosine
  modified_base 20: mod_base = OTHER; note = 2'O-methyl-cytidine
  modified_base 21: mod_base = OTHER; note = 2'O-methyl-adenosine
  modified_base 1..2: mod_base = OTHER; note = phosphorothioate linkage
  modified_base 2..3: mod_base = OTHER; note = phosphorothioate linkage
  source 1..21: mol_type = other RNA
tcaggaggaattttgggtaca

SEQ ID NO: 289 - RNA, 21 nt, synthetic construct
  misc_feature 1..21: note = Description of origin: HCII siRNA sense strands
  misc_feature 1..21: note = Description of source:Sense strand ID:
  modified_base 1: mod_base = OTHER; note = 2'O-methyl-guanosine
  modified_base 2: mod_base = OTHER; note = 2'O-methyl-cytidine
  modified_base 3: mod_base = OTHER; note = 2'O-methyl-uridine
  modified_base 4: mod_base = OTHER; note = 2'O-methyl-guanosine
  modified_base 5: mod_base = OTHER; note = 2'O-methyl-cytidine
  modified_base 6: mod_base = OTHER; note = 2'O-methyl-cytidine
  modified_base 7: mod_base = OTHER; note = 2' Fluoro-uridine
  modified_base 8: mod_base = OTHER; note = 2' Fluoro-guanosine
  modified_base 9: mod_base = OTHER; note = 2' Fluoro-cytidine
  modified_base 10: mod_base = OTHER; note = 2' Fluoro-uridine
  modified_base 11: mod_base = OTHER; note = 2' Fluoro-cytidine
  modified_base 12: mod_base = OTHER; note = 2'O-methyl-uridine
  modified_base 13: mod_base = OTHER; note = 2'O-methyl-uridine
  modified_base 14: mod_base = OTHER; note = 2'O-methyl-cytidine
  modified_base 15: mod_base = OTHER; note = 2'O-methyl-adenosine
  modified_base 16: mod_base = OTHER; note = 2'O-methyl-uridine
  modified_base 17: mod_base = OTHER; note = 2'O-methyl-guanosine
  modified_base 18: mod_base = OTHER; note = 2'O-methyl-guanosine
  modified_base 19: mod_base = OTHER; note = 2' Fluoro-guanosine
  modified_base 20: mod_base = OTHER; note = 2'O-methyl-adenosine
  modified_base 21: mod_base = OTHER; note = 2'O-methyl-adenosine
  modified_base 1..2: mod_base = OTHER; note = phosphorothioate linkage
  modified_base 2..3: mod_base = OTHER; note = phosphorothioate linkage
  source 1..21: mol_type = other RNA
gctgcctgctcttcatgggaa

SEQ ID NO: 290 - RNA, 21 nt, synthetic construct
  misc_feature 1..21: note = Description of origin: HCII siRNA sense strands
  misc_feature 1..21: note = Description of source:Sense strand ID:
  modified_base 1: mod_base = OTHER; note = 2'O-methyl-cytidine
  modified_base 2: mod_base = OTHER; note = 2'O-methyl-adenosine
  modified_base 3: mod_base = OTHER; note = 2'O-methyl-cytidine
  modified_base 4: mod_base = OTHER; note = 2'O-methyl-cytidine
  modified_base 5: mod_base = OTHER; note = 2'O-methyl-adenosine
  modified_base 6: mod_base = OTHER; note = 2'O-methyl-adenosine
  modified_base 7: mod_base = OTHER; note = 2' Fluoro-guanosine
  modified_base 8: mod_base = OTHER; note = 2' Fluoro-guanosine
  modified_base 9: mod_base = OTHER; note = 2' Fluoro-guanosine
  modified_base 10: mod_base = OTHER; note = 2' Fluoro-cytidine
  modified_base 11: mod_base = OTHER; note = 2' Fluoro-cytidine
  modified_base 12: mod_base = OTHER; note = 2'O-methyl-uridine
  modified_base 13: mod_base = OTHER; note = 2'O-methyl-cytidine
  modified_base 14: mod_base = OTHER; note = 2'O-methyl-adenosine
  modified_base 15: mod_base = OTHER; note = 2'O-methyl-uridine
  modified_base 16: mod_base = OTHER; note = 2'O-methyl-adenosine
  modified_base 17: mod_base = OTHER; note = 2'O-methyl-adenosine
  modified_base 18: mod_base = OTHER; note = 2'O-methyl-adenosine
  modified_base 19: mod_base = OTHER; note = 2'Fluoro-adenosine
  modified_base 20: mod_base = OTHER; note = 2'O-methyl-guanosine
  modified_base 21: mod_base = OTHER; note = 2'O-methyl-adenosine
  modified_base 1..2: mod_base = OTHER; note = phosphorothioate linkage
  modified_base 2..3: mod_base = OTHER; note = phosphorothioate linkage
  source 1..21: mol_type = other RNA
caccaagggcctcataaaaga

SEQ ID NO: 291 - RNA, 21 nt, synthetic construct
  misc_feature 1..21: note = Description of origin: HCII siRNA sense strands
  misc_feature 1..21: note = Description of source:Sense strand ID:
  modified_base 1: mod_base = OTHER; note = 2'O-methyl-cytidine
  modified_base 2: mod_base = OTHER; note = 2'O-methyl-cytidine
  modified_base 3: mod_base = OTHER; note = 2'O-methyl-uridine
  modified_base 4: mod_base = OTHER; note = 2'O-methyl-uridine
  modified_base 5: mod_base = OTHER; note = 2'O-methyl-uridine
  modified_base 6: mod_base = OTHER; note = 2'O-methyl-adenosine
  modified_base 7: mod_base = OTHER; note = 2' Fluoro-uridine
  modified_base 8: mod_base = OTHER; note = 2'Fluoro-adenosine
  modified_base 9: mod_base = OTHER; note = 2' Fluoro-uridine
  modified_base 10: mod_base = OTHER; note = 2' Fluoro-cytidine
  modified_base 11: mod_base = OTHER; note = 2' Fluoro-cytidine
  modified_base 12: mod_base = OTHER; note = 2'O-methyl-adenosine
  modified_base 13: mod_base = OTHER; note = 2'O-methyl-guanosine
  modified_base 14: mod_base = OTHER; note = 2'O-methyl-adenosine
  modified_base 15: mod_base = OTHER; note = 2'O-methyl-adenosine
  modified_base 16: mod_base = OTHER; note = 2'O-methyl-guanosine
  modified_base 17: mod_base = OTHER; note = 2'O-methyl-cytidine
  modified_base 18: mod_base = OTHER; note = 2'O-methyl-adenosine
  modified_base 19: mod_base = OTHER; note = 2' Fluoro-guanosine
  modified_base 20: mod_base = OTHER; note = 2'O-methyl-uridine
  modified_base 21: mod_base = OTHER; note = 2'O-methyl-uridine
  modified_base 1..2: mod_base = OTHER; note = phosphorothioate linkage
  modified_base 2..3: mod_base = OTHER; note = phosphorothioate linkage
  source 1..21: mol_type = other RNA
cctttatatccagaagcagtt

SEQ ID NO: 292 - RNA, 21 nt, synthetic construct
  misc_feature 1..21: note = Description of origin: HCII siRNA sense strands
  misc_feature 1..21: note = Description of source:Sense strand ID:
  modified_base 1: mod_base = OTHER; note = 2'O-methyl-cytidine
  modified_base 2: mod_base = OTHER; note = 2'O-methyl-adenosine
  modified_base 3: mod_base = OTHER; note = 2'O-methyl-adenosine
  modified_base 4: mod_base = OTHER; note = 2'O-methyl-cytidine
  modified_base 5: mod_base = OTHER; note = 2'O-methyl-uridine
  modified_base 6: mod_base = OTHER; note = 2'O-methyl-guanosine
  modified_base 7: mod_base = OTHER; note = 2' Fluoro-cytidine
  modified_base 8: mod_base = OTHER; note = 2'Fluoro-adenosine
  modified_base 9: mod_base = OTHER; note = 2' Fluoro-uridine
  modified_base 10: mod_base = OTHER; note = 2' Fluoro-cytidine
  modified_base 11: mod_base = OTHER; note = 2' Fluoro-uridine
  modified_base 12: mod_base = OTHER; note = 2'O-methyl-adenosine
  modified_base 13: mod_base = OTHER; note = 2'O-methyl-cytidine
  modified_base 14: mod_base = OTHER; note = 2'O-methyl-uridine
  modified_base 15: mod_base = OTHER; note = 2'O-methyl-uridine
  modified_base 16: mod_base = OTHER; note = 2'O-methyl-cytidine
  modified_base 17: mod_base = OTHER; note = 2'O-methyl-adenosine
  modified_base 18: mod_base = OTHER; note = 2'O-methyl-adenosine
  modified_base 19: mod_base = OTHER; note = 2'Fluoro-adenosine
  modified_base 20: mod_base = OTHER; note = 2'O-methyl-guanosine
  modified_base 21: mod_base = OTHER; note = 2'O-methyl-guanosine
  modified_base 1..2: mod_base = OTHER; note = phosphorothioate linkage
  modified_base 2..3: mod_base = OTHER; note = phosphorothioate linkage
  source 1..21: mol_type = other RNA
caactgcatctacttcaaagg

SEQ ID NO: 293 - RNA, 21 nt, synthetic construct
  misc_feature 1..21: note = Description of origin: HCII siRNA sense strands
  misc_feature 1..21: note = Description of source:Sense strand ID:
  modified_base 1: mod_base = OTHER; note = 2'O-methyl-guanosine
  modified_base 2: mod_base = OTHER; note = 2'O-methyl-adenosine
  modified_base 3: mod_base = OTHER; note = 2'O-methyl-guanosine
  modified_base 4: mod_base = OTHER; note = 2'O-methyl-cytidine
  modified_base 5: mod_base = OTHER; note = 2'O-methyl-cytidine
  modified_base 6: mod_base = OTHER; note = 2'O-methyl-guanosine
  modified_base 7: mod_base = OTHER; note = 2' Fluoro-guanosine
  modified_base 8: mod_base = OTHER; note = 2'Fluoro-adenosine
  modified_base 9: mod_base = OTHER; note = 2' Fluoro-uridine
  modified_base 10: mod_base = OTHER; note = 2' Fluoro-cytidine
  modified_base 11: mod_base = OTHER; note = 2' Fluoro-cytidine
  modified_base 12: mod_base = OTHER; note = 2'O-methyl-adenosine
  modified_base 13: mod_base = OTHER; note = 2'O-methyl-guanosine
  modified_base 14: mod_base = OTHER; note = 2'O-methyl-cytidine
  modified_base 15: mod_base = OTHER; note = 2'O-methyl-guanosine
  modified_base 16: mod_base = OTHER; note = 2'O-methyl-uridine
  modified_base 17: mod_base = OTHER; note = 2'O-methyl-cytidine
  modified_base 18: mod_base = OTHER; note = 2'O-methyl-uridine
  modified_base 19: mod_base = OTHER; note = 2' Fluoro-uridine
  modified_base 20: mod_base = OTHER; note = 2'O-methyl-adenosine
  modified_base 21: mod_base = OTHER; note = 2'O-methyl-adenosine
  modified_base 1..2: mod_base = OTHER; note = phosphorothioate linkage
  modified_base 2..3: mod_base = OTHER; note = phosphorothioate linkage
  source 1..21: mol_type = other RNA
gagccggatccagcgtcttaa

SEQ ID NO: 294 - RNA, 21 nt, synthetic construct
  misc_feature 1..21: note = Description of origin: HCII siRNA sense strands
  misc_feature 1..21: note = Description of source:Sense strand ID:
  modified_base 1: mod_base = OTHER; note = 2'O-methyl-adenosine
  modified_base 2: mod_base = OTHER; note = 2'O-methyl-uridine
  modified_base 3: mod_base = OTHER; note = 2'O-methyl-cytidine
  modified_base 4: mod_base = OTHER; note = 2'O-methyl-cytidine
  modified_base 5: mod_base = OTHER; note = 2'O-methyl-adenosine
  modified_base 6: mod_base = OTHER; note = 2'O-methyl-guanosine
  modified_base 7: mod_base = OTHER; note = 2' Fluoro-cytidine
  modified_base 8: mod_base = OTHER; note = 2' Fluoro-guanosine
  modified_base 9: mod_base = OTHER; note = 2' Fluoro-uridine
  modified_base 10: mod_base = OTHER; note = 2' Fluoro-cytidine
  modified_base 11: mod_base = OTHER; note = 2' Fluoro-uridine
  modified_base 12: mod_base = OTHER; note = 2'O-methyl-uridine
  modified_base 13: mod_base = OTHER; note = 2'O-methyl-adenosine
  modified_base 14: mod_base = OTHER; note = 2'O-methyl-adenosine
  modified_base 15: mod_base = OTHER; note = 2'O-methyl-cytidine
  modified_base 16: mod_base = OTHER; note = 2'O-methyl-adenosine
  modified_base 17: mod_base = OTHER; note = 2'O-methyl-uridine
  modified_base 18: mod_base = OTHER; note = 2'O-methyl-cytidine
  modified_base 19: mod_base = OTHER; note = 2' Fluoro-cytidine
  modified_base 20: mod_base = OTHER; note = 2'O-methyl-uridine
  modified_base 21: mod_base = OTHER; note = 2'O-methyl-cytidine
  modified_base 1..2: mod_base = OTHER; note = phosphorothioate linkage
  modified_base 2..3: mod_base = OTHER; note = phosphorothioate linkage
  source 1..21: mol_type = other RNA
atccagcgtcttaacatcctc

SEQ ID NO: 295 - RNA, 21 nt, synthetic construct
  misc_feature 1..21: note = Description of origin: HCII siRNA sense strands
  misc_feature 1..21: note = Description of source:Sense strand ID:
  modified_base 1: mod_base = OTHER; note = 2'O-methyl-cytidine
  modified_base 2: mod_base = OTHER; note = 2'O-methyl-adenosine
  modified_base 3: mod_base = OTHER; note = 2'O-methyl-adenosine
  modified_base 4: mod_base = OTHER; note = 2'O-methyl-adenosine
  modified_base 5: mod_base = OTHER; note = 2'O-methyl-adenosine
  modified_base 6: mod_base = OTHER; note = 2'O-methyl-adenosine
  modified_base 7: mod_base = OTHER; note = 2'Fluoro-adenosine
  modified_base 8: mod_base = OTHER; note = 2' Fluoro-guanosine
  modified_base 9: mod_base = OTHER; note = 2' Fluoro-cytidine
  modified_base 10: mod_base = OTHER; note = 2'Fluoro-adenosine
  modified_base 11: mod_base = OTHER; note = 2' Fluoro-uridine
  modified_base 12: mod_base = OTHER; note = 2'O-methyl-guanosine
  modified_base 13: mod_base = OTHER; note = 2'O-methyl-adenosine
  modified_base 14: mod_base = OTHER; note = 2'O-methyl-cytidine
  modified_base 15: mod_base = OTHER; note = 2'O-methyl-adenosine
  modified_base 16: mod_base = OTHER; note = 2'O-methyl-adenosine
  modified_base 17: mod_base = OTHER; note = 2'O-methyl-adenosine
  modified_base 18: mod_base = OTHER; note = 2'O-methyl-cytidine
  modified_base 19: mod_base = OTHER; note = 2'Fluoro-adenosine
  modified_base 20: mod_base = OTHER; note = 2'O-methyl-guanosine
  modified_base 21: mod_base = OTHER; note = 2'O-methyl-adenosine
  modified_base 1..2: mod_base = OTHER; note = phosphorothioate linkage
  modified_base 2..3: mod_base = OTHER; note = phosphorothioate linkage
  source 1..21: mol_type = other RNA
caaaaaagcatgacaaacaga

SEQ ID NO: 296 - RNA, 21 nt, synthetic construct
  misc_feature 1..21: note = Description of origin: HCII siRNA sense strands
  misc_feature 1..21: note = Description of source:Sense strand ID:
  modified_base 1: mod_base = OTHER; note = 2'O-methyl-cytidine
  modified_base 2: mod_base = OTHER; note = 2'O-methyl-adenosine
  modified_base 3: mod_base = OTHER; note = 2'O-methyl-guanosine
  modified_base 4: mod_base = OTHER; note = 2'O-methyl-guanosine
  modified_base 5: mod_base = OTHER; note = 2'O-methyl-adenosine
  modified_base 6: mod_base = OTHER; note = 2'O-methyl-guanosine
  modified_base 7: mod_base = OTHER; note = 2' Fluoro-guanosine
  modified_base 8: mod_base = OTHER; note = 2'Fluoro-adenosine
  modified_base 9: mod_base = OTHER; note = 2'Fluoro-adenosine
  modified_base 10: mod_base = OTHER; note = 2' Fluoro-uridine
  modified_base 11: mod_base = OTHER; note = 2' Fluoro-uridine
  modified_base 12: mod_base = OTHER; note = 2'O-methyl-uridine
  modified_base 13: mod_base = OTHER; note = 2'O-methyl-uridine
  modified_base 14: mod_base = OTHER; note = 2'O-methyl-guanosine
  modified_base 15: mod_base = OTHER; note = 2'O-methyl-guanosine
  modified_base 16: mod_base = OTHER; note = 2'O-methyl-guanosine
  modified_base 17: mod_base = OTHER; note = 2'O-methyl-uridine
  modified_base 18: mod_base = OTHER; note = 2'O-methyl-adenosine
  modified_base 19: mod_base = OTHER; note = 2' Fluoro-cytidine
  modified_base 20: mod_base = OTHER; note = 2'O-methyl-adenosine
  modified_base 21: mod_base = OTHER; note = 2'O-methyl-cytidine
  modified_base 1..2: mod_base = OTHER; note = phosphorothioate linkage
  modified_base 2..3: mod_base = OTHER; note = phosphorothioate linkage
  source 1..21: mol_type = other RNA
caggaggaattttgggtacac

SEQ ID NO: 297 - RNA, 21 nt, synthetic construct
  misc_feature 1..21: note = Description of origin: HCII siRNA sense strands
  misc_feature 1..21: note = Description of source:Sense strand ID:
  modified_base 1: mod_base = OTHER; note = 2'O-methyl-cytidine
  modified_base 2: mod_base = OTHER; note = 2'O-methyl-adenosine
  modified_base 3: mod_base = OTHER; note = 2'O-methyl-adenosine
  modified_base 4: mod_base = OTHER; note = 2'O-methyl-cytidine
  modified_base 5: mod_base = OTHER; note = 2'O-methyl-cytidine
  modified_base 6: mod_base = OTHER; note = 2'O-methyl-adenosine
  modified_base 7: mod_base = OTHER; note = 2' Fluoro-cytidine
  modified_base 8: mod_base = OTHER; note = 2'Fluoro-adenosine
  modified_base 9: mod_base = OTHER; note = 2'Fluoro-adenosine
  modified_base 10: mod_base = OTHER; note = 2' Fluoro-cytidine
  modified_base 11: mod_base = OTHER; note = 2' Fluoro-uridine
  modified_base 12: mod_base = OTHER; note = 2'O-methyl-uridine
  modified_base 13: mod_base = OTHER; note = 2'O-methyl-cytidine
  modified_base 14: mod_base = OTHER; note = 2'O-methyl-cytidine
  modified_base 15: mod_base = OTHER; note = 2'O-methyl-guanosine
  modified_base 16: mod_base = OTHER; note = 2'O-methyl-guanosine
  modified_base 17: mod_base = OTHER; note = 2'O-methyl-cytidine
  modified_base 18: mod_base = OTHER; note = 2'O-methyl-uridine
  modified_base 19: mod_base = OTHER; note = 2' Fluoro-guanosine
  modified_base 20: mod_base = OTHER; note = 2'O-methyl-adenosine
  modified_base 21: mod_base = OTHER; note = 2'O-methyl-adenosine
  modified_base 1..2: mod_base = OTHER; note = phosphorothioate linkage
  modified_base 2..3: mod_base = OTHER; note = phosphorothioate linkage
  source 1..21: mol_type = other RNA
caaccacaacttccggctgaa

SEQ ID NO: 298 - RNA, 21 nt, synthetic construct
  misc_feature 1..21: note = Description of origin: HCII siRNA sense strands
  misc_feature 1..21: note = Description of source:Sense strand ID:
  modified_base 1: mod_base = OTHER; note = 2'O-methyl-guanosine
  modified_base 2: mod_base = OTHER; note = 2'O-methyl-guanosine
  modified_base 3: mod_base = OTHER; note = 2'O-methyl-cytidine
  modified_base 4: mod_base = OTHER; note = 2'O-methyl-adenosine
  modified_base 5: mod_base = OTHER; note = 2'O-methyl-adenosine
  modified_base 6: mod_base = OTHER; note = 2'O-methyl-adenosine
  modified_base 7: mod_base = OTHER; note = 2'Fluoro-adenosine
  modified_base 8: mod_base = OTHER; note = 2'Fluoro-adenosine
  modified_base 9: mod_base = OTHER; note = 2'Fluoro-adenosine
  modified_base 10: mod_base = OTHER; note = 2' Fluoro-guanosine
  modified_base 11: mod_base = OTHER; note = 2' Fluoro-cytidine
  modified_base 12: mod_base = OTHER; note = 2'O-methyl-adenosine
  modified_base 13: mod_base = OTHER; note = 2'O-methyl-uridine
  modified_base 14: mod_base = OTHER; note = 2'O-methyl-guanosine
  modified_base 15: mod_base = OTHER; note = 2'O-methyl-adenosine
  modified_base 16: mod_base = OTHER; note = 2'O-methyl-cytidine
  modified_base 17: mod_base = OTHER; note = 2'O-methyl-adenosine
  modified_base 18: mod_base = OTHER; note = 2'O-methyl-adenosine
  modified_base 19: mod_base = OTHER; note = 2'Fluoro-adenosine
  modified_base 20: mod_base = OTHER; note = 2'O-methyl-cytidine
  modified_base 21: mod_base = OTHER; note = 2'O-methyl-adenosine
  modified_base 1..2: mod_base = OTHER; note = phosphorothioate linkage
  modified_base 2..3: mod_base = OTHER; note = phosphorothioate linkage
  source 1..21: mol_type = other RNA
ggcaaaaaagcatgacaaaca

SEQ ID NO: 299 - RNA, 21 nt, synthetic construct
  misc_feature 1..21: note = Description of origin: HCII siRNA sense strands
  misc_feature 1..21: note = Description of source:Sense strand ID:
  modified_base 1: mod_base = OTHER; note = 2'O-methyl-guanosine
  modified_base 2: mod_base = OTHER; note = 2'O-methyl-adenosine
  modified_base 3: mod_base = OTHER; note = 2'O-methyl-adenosine
  modified_base 4: mod_base = OTHER; note = 2'O-methyl-uridine
  modified_base 5: mod_base = OTHER; note = 2'O-methyl-adenosine
  modified_base 6: mod_base = OTHER; note = 2'O-methyl-adenosine
  modified_base 7: mod_base = OTHER; note = 2'Fluoro-adenosine
  modified_base 8: mod_base = OTHER; note = 2' Fluoro-uridine
  modified_base 9: mod_base = OTHER; note = 2' Fluoro-uridine
  modified_base 10: mod_base = OTHER; note = 2' Fluoro-cytidine
  modified_base 11: mod_base = OTHER; note = 2' Fluoro-cytidine
  modified_base 12: mod_base = OTHER; note = 2'O-methyl-cytidine
  modified_base 13: mod_base = OTHER; note = 2'O-methyl-adenosine
  modified_base 14: mod_base = OTHER; note = 2'O-methyl-guanosine
  modified_base 15: mod_base = OTHER; note = 2'O-methyl-uridine
  modified_base 16: mod_base = OTHER; note = 2'O-methyl-guanosine
  modified_base 17: mod_base = OTHER; note = 2'O-methyl-guanosine
  modified_base 18: mod_base = OTHER; note = 2'O-methyl-adenosine
  modified_base 19: mod_base = OTHER; note = 2'Fluoro-adenosine
  modified_base 20: mod_base = OTHER; note = 2'O-methyl-adenosine
  modified_base 21: mod_base = OTHER; note = 2'O-methyl-uridine
  modified_base 1..2: mod_base = OTHER; note = phosphorothioate linkage
  modified_base 2..3: mod_base = OTHER; note = phosphorothioate linkage
  source 1..21: mol_type = other RNA
gaataaattcccagtggaaat

SEQ ID NO: 300 - RNA, 21 nt, synthetic construct
  misc_feature 1..21: note = Description of origin: HCII siRNA sense strands
  misc_feature 1..21: note = Description of source:Sense strand ID:
  modified_base 1: mod_base = OTHER; note = 2'O-methyl-guanosine
  modified_base 2: mod_base = OTHER; note = 2'O-methyl-guanosine
  modified_base 3: mod_base = OTHER; note = 2'O-methyl-guanosine
  modified_base 4: mod_base = OTHER; note = 2'O-methyl-cytidine
  modified_base 5: mod_base = OTHER; note = 2'O-methyl-adenosine
  modified_base 6: mod_base = OTHER; note = 2'O-methyl-uridine
  modified_base 7: mod_base = OTHER; note = 2' Fluoro-cytidine
  modified_base 8: mod_base = OTHER; note = 2'Fluoro-adenosine
  modified_base 9: mod_base = OTHER; note = 2' Fluoro-guanosine
  modified_base 10: mod_base = OTHER; note = 2' Fluoro-cytidine
  modified_base 11: mod_base = OTHER; note = 2'Fluoro-adenosine
  modified_base 12: mod_base = OTHER; note = 2'O-methyl-uridine
  modified_base 13: mod_base = OTHER; note = 2'O-methyl-guanosine
  modified_base 14: mod_base = OTHER; note = 2'O-methyl-cytidine
  modified_base 15: mod_base = OTHER; note = 2'O-methyl-uridine
  modified_base 16: mod_base = OTHER; note = 2'O-methyl-adenosine
  modified_base 17: mod_base = OTHER; note = 2'O-methyl-adenosine
  modified_base 18: mod_base = OTHER; note = 2'O-methyl-uridine
  modified_base 19: mod_base = OTHER; note = 2' Fluoro-uridine
  modified_base 20: mod_base = OTHER; note = 2'O-methyl-guanosine
  modified_base 21: mod_base = OTHER; note = 2'O-methyl-uridine
  modified_base 1..2: mod_base = OTHER; note = phosphorothioate linkage
  modified_base 2..3: mod_base = OTHER; note = phosphorothioate linkage
  source 1..21: mol_type = other RNA
gggcatcagcatgctaattgt

SEQ ID NO: 301 - RNA, 21 nt, synthetic construct
  misc_feature 1..21: note = Description of origin: HCII siRNA sense strands
  misc_feature 1..21: note = Description of source:Sense strand ID:
  modified_base 1: mod_base = OTHER; note = 2'O-methyl-adenosine
  modified_base 2: mod_base = OTHER; note = 2'O-methyl-adenosine
  modified_base 3: mod_base = OTHER; note = 2'O-methyl-adenosine
  modified_base 4: mod_base = OTHER; note = 2'O-methyl-adenosine
  modified_base 5: mod_base = OTHER; note = 2'O-methyl-adenosine
  modified_base 6: mod_base = OTHER; note = 2'O-methyl-guanosine
  modified_base 7: mod_base = OTHER; note = 2' Fluoro-cytidine
  modified_base 8: mod_base = OTHER; note = 2'Fluoro-adenosine
  modified_base 9: mod_base = OTHER; note = 2' Fluoro-uridine
  modified_base 10: mod_base = OTHER; note = 2' Fluoro-guanosine
  modified_base 11: mod_base = OTHER; note = 2'Fluoro-adenosine
  modified_base 12: mod_base = OTHER; note = 2'O-methyl-cytidine
  modified_base 13: mod_base = OTHER; note = 2'O-methyl-adenosine
  modified_base 14: mod_base = OTHER; note = 2'O-methyl-adenosine
  modified_base 15: mod_base = OTHER; note = 2'O-methyl-adenosine
  modified_base 16: mod_base = OTHER; note = 2'O-methyl-cytidine
  modified_base 17: mod_base = OTHER; note = 2'O-methyl-adenosine
  modified_base 18: mod_base = OTHER; note = 2'O-methyl-guanosine
  modified_base 19: mod_base = OTHER; note = 2'Fluoro-adenosine
  modified_base 20: mod_base = OTHER; note = 2'O-methyl-adenosine
  modified_base 21: mod_base = OTHER; note = 2'O-methyl-cytidine
  modified_base 1..2: mod_base = OTHER; note = phosphorothioate linkage
  modified_base 2..3: mod_base = OTHER; note = phosphorothioate linkage
  source 1..21: mol_type = other RNA
aaaaagcatgacaaacagaac

SEQ ID NO: 302 - RNA, 21 nt, synthetic construct
  misc_feature 1..21: note = Description of origin: HCII siRNA sense strands
  misc_feature 1..21: note = Description of source:Sense strand ID:
  modified_base 1: mod_base = OTHER; note = 2'O-methyl-guanosine
  modified_base 2: mod_base = OTHER; note = 2'O-methyl-adenosine
  modified_base 3: mod_base = OTHER; note = 2'O-methyl-guanosine
  modified_base 4: mod_base = OTHER; note = 2'O-methyl-uridine
  modified_base 5: mod_base = OTHER; note = 2'O-methyl-adenosine
  modified_base 6: mod_base = OTHER; note = 2'O-methyl-uridine
  modified_base 7: mod_base = OTHER; note = 2' Fluoro-uridine
  modified_base 8: mod_base = OTHER; note = 2'Fluoro-adenosine
  modified_base 9: mod_base = OTHER; note = 2' Fluoro-cytidine
  modified_base 10: mod_base = OTHER; note = 2' Fluoro-uridine
  modified_base 11: mod_base = OTHER; note = 2' Fluoro-uridine
  modified_base 12: mod_base = OTHER; note = 2'O-methyl-uridine
  modified_base 13: mod_base = OTHER; note = 2'O-methyl-guanosine
  modified_base 14: mod_base = OTHER; note = 2'O-methyl-cytidine
  modified_base 15: mod_base = OTHER; note = 2'O-methyl-uridine
  modified_base 16: mod_base = OTHER; note = 2'O-methyl-guanosine
  modified_base 17: mod_base = OTHER; note = 2'O-methyl-adenosine
  modified_base 18: mod_base = OTHER; note = 2'O-methyl-guanosine
  modified_base 19: mod_base = OTHER; note = 2' Fluoro-guanosine
  modified_base 20: mod_base = OTHER; note = 2'O-methyl-cytidine
  modified_base 21: mod_base = OTHER; note = 2'O-methyl-cytidine
  modified_base 1..2: mod_base = OTHER; note = phosphorothioate linkage
  modified_base 2..3: mod_base = OTHER; note = phosphorothioate linkage
  source 1..21: mol_type = other RNA
gagtattactttgctgaggcc

SEQ ID NO: 303 - RNA, 21 nt, synthetic construct
  misc_feature 1..21: note = Description of origin: HCII siRNA sense strands
  misc_feature 1..21: note = Description of source:Sense strand ID:
  modified_base 1: mod_base = OTHER; note = 2'O-methyl-uridine
  modified_base 2: mod_base = OTHER; note = 2'O-methyl-guanosine
  modified_base 3: mod_base = OTHER; note = 2'O-methyl-adenosine
  modified_base 4: mod_base = OTHER; note = 2'O-methyl-adenosine
  modified_base 5: mod_base = OTHER; note = 2'O-methyl-uridine
  modified_base 6: mod_base = OTHER; note = 2'Fluoro-adenosine
  modified_base 7: mod_base = OTHER; note = 2'Fluoro-adenosine
  modified_base 8: mod_base = OTHER; note = 2'O-methyl-adenosine
  modified_base 9: mod_base = OTHER; note = 2' Fluoro-uridine
  modified_base 10: mod_base = OTHER; note = 2' Fluoro-uridine
  modified_base 11: mod_base = OTHER; note = 2' Fluoro-cytidine
  modified_base 12: mod_base = OTHER; note = 2' Fluoro-cytidine
  modified_base 13: mod_base = OTHER; note = 2'O-methyl-cytidine
  modified_base 14: mod_base = OTHER; note = 2'O-methyl-adenosine
  modified_base 15: mod_base = OTHER; note = 2'O-methyl-guanosine
  modified_base 16: mod_base = OTHER; note = 2'O-methyl-uridine
  modified_base 17: mod_base = OTHER; note = 2'O-methyl-guanosine
  modified_base 18: mod_base = OTHER; note = 2'O-methyl-guanosine
  modified_base 19: mod_base = OTHER; note = 2'O-methyl-adenosine
  modified_base 20: mod_base = OTHER; note = 2'O-methyl-adenosine
  modified_base 21: mod_base = OTHER; note = 2'O-methyl-adenosine
  modified_base 1..2: mod_base = OTHER; note = phosphorothioate linkage
  modified_base 2..3: mod_base = OTHER; note = phosphorothioate linkage
  source 1..21: mol_type = other RNA
tgaataaattcccagtggaaa

SEQ ID NO: 304 - RNA, 21 nt, synthetic construct
  misc_feature 1..21: note = Description of origin: HCII siRNA sense strands
  misc_feature 1..21: note = Description of source:Sense strand ID:
  modified_base 1: mod_base = OTHER; note = 2'O-methyl-cytidine
  modified_base 2: mod_base = OTHER; note = 2'O-methyl-uridine
  modified_base 3: mod_base = OTHER; note = 2'O-methyl-guanosine
  modified_base 4: mod_base = OTHER; note = 2'O-methyl-cytidine
  modified_base 5: mod_base = OTHER; note = 2'O-methyl-adenosine
  modified_base 6: mod_base = OTHER; note = 2' Fluoro-uridine
  modified_base 7: mod_base = OTHER; note = 2' Fluoro-cytidine
  modified_base 8: mod_base = OTHER; note = 2'O-methyl-uridine
  modified_base 9: mod_base = OTHER; note = 2'Fluoro-adenosine
  modified_base 10: mod_base = OTHER; note = 2' Fluoro-cytidine
  modified_base 11: mod_base = OTHER; note = 2' Fluoro-uridine
  modified_base 12: mod_base = OTHER; note = 2' Fluoro-uridine
  modified_base 13: mod_base = OTHER; note = 2'O-methyl-cytidine
  modified_base 14: mod_base = OTHER; note = 2'O-methyl-adenosine
  modified_base 15: mod_base = OTHER; note = 2'O-methyl-adenosine
  modified_base 16: mod_base = OTHER; note = 2'O-methyl-adenosine
  modified_base 17: mod_base = OTHER; note = 2'O-methyl-guanosine
  modified_base 18: mod_base = OTHER; note = 2'O-methyl-guanosine
  modified_base 19: mod_base = OTHER; note = 2'O-methyl-adenosine
  modified_base 20: mod_base = OTHER; note = 2'O-methyl-uridine
  modified_base 21: mod_base = OTHER; note = 2'O-methyl-cytidine
  modified_base 1..2: mod_base = OTHER; note = phosphorothioate linkage
  modified_base 2..3: mod_base = OTHER; note = phosphorothioate linkage
  source 1..21: mol_type = other RNA
ctgcatctacttcaaaggatc

SEQ ID NO: 305 - RNA, 21 nt, synthetic construct
  misc_feature 1..21: note = Description of origin: HCII siRNA sense strands
  misc_feature 1..21: note = Description of source:Sense strand ID:
  modified_base 1: mod_base = OTHER; note = 2'O-methyl-adenosine
  modified_base 2: mod_base = OTHER; note = 2'O-methyl-cytidine
  modified_base 3: mod_base = OTHER; note = 2'O-methyl-uridine
  modified_base 4: mod_base = OTHER; note = 2'O-methyl-guanosine
  modified_base 5: mod_base = OTHER; note = 2'O-methyl-cytidine
  modified_base 6: mod_base = OTHER; note = 2'Fluoro-adenosine
  modified_base 7: mod_base = OTHER; note = 2' Fluoro-uridine
  modified_base 8: mod_base = OTHER; note = 2'O-methyl-cytidine
  modified_base 9: mod_base = OTHER; note = 2' Fluoro-uridine
  modified_base 10: mod_base = OTHER; note = 2'Fluoro-adenosine
  modified_base 11: mod_base = OTHER; note = 2' Fluoro-cytidine
  modified_base 12: mod_base = OTHER; note = 2' Fluoro-uridine
  modified_base 13: mod_base = OTHER; note = 2'O-methyl-uridine
  modified_base 14: mod_base = OTHER; note = 2'O-methyl-cytidine
  modified_base 15: mod_base = OTHER; note = 2'O-methyl-adenosine
  modified_base 16: mod_base = OTHER; note = 2'O-methyl-adenosine
  modified_base 17: mod_base = OTHER; note = 2'O-methyl-adenosine
  modified_base 18: mod_base = OTHER; note = 2'O-methyl-guanosine
  modified_base 19: mod_base = OTHER; note = 2'O-methyl-guanosine
  modified_base 20: mod_base = OTHER; note = 2'O-methyl-adenosine
  modified_base 21: mod_base = OTHER; note = 2'O-methyl-uridine
  modified_base 1..2: mod_base = OTHER; note = phosphorothioate linkage
  modified_base 2..3: mod_base = OTHER; note = phosphorothioate linkage
  source 1..21: mol_type = other RNA
actgcatctacttcaaaggat

SEQ ID NO: 306 - RNA, 21 nt, synthetic construct
  misc_feature 1..21: note = Description of origin: HCII siRNA sense strands
  misc_feature 1..21: note = Description of source:Sense strand ID:
  modified_base 1: mod_base = OTHER; note = 2'O-methyl-guanosine
  modified_base 2: mod_base = OTHER; note = 2'O-methyl-guanosine
  modified_base 3: mod_base = OTHER; note = 2'O-methyl-guanosine
  modified_base 4: mod_base = OTHER; note = 2'O-methyl-adenosine
  modified_base 5: mod_base = OTHER; note = 2'O-methyl-guanosine
  modified_base 6: mod_base = OTHER; note = 2'Fluoro-adenosine
  modified_base 7: mod_base = OTHER; note = 2' Fluoro-guanosine
  modified_base 8: mod_base = OTHER; note = 2'O-methyl-adenosine
  modified_base 9: mod_base = OTHER; note = 2' Fluoro-cytidine
  modified_base 10: mod_base = OTHER; note = 2' Fluoro-cytidine
  modified_base 11: mod_base = OTHER; note = 2' Fluoro-cytidine
  modified_base 12: mod_base = OTHER; note = 2'Fluoro-adenosine
  modified_base 13: mod_base = OTHER; note = 2'O-methyl-uridine
  modified_base 14: mod_base = OTHER; note = 2'O-methyl-guanosine
  modified_base 15: mod_base = OTHER; note = 2'O-methyl-adenosine
  modified_base 16: mod_base = OTHER; note = 2'O-methyl-adenosine
  modified_base 17: mod_base = OTHER; note = 2'O-methyl-cytidine
  modified_base 18: mod_base = OTHER; note = 2'O-methyl-adenosine
  modified_base 19: mod_base = OTHER; note = 2'O-methyl-adenosine
  modified_base 20: mod_base = OTHER; note = 2'O-methyl-guanosine
  modified_base 21: mod_base = OTHER; note = 2'O-methyl-uridine
  modified_base 1..2: mod_base = OTHER; note = phosphorothioate linkage
  modified_base 2..3: mod_base = OTHER; note = phosphorothioate linkage
  source 1..21: mol_type = other RNA
gggagagacccatgaacaagt

SEQ ID NO: 307 - RNA, 21 nt, synthetic construct
  misc_feature 1..21: note = Description of origin: HCII siRNA sense strands
  misc_feature 1..21: note = Description of source:Sense strand ID:
  modified_base 1: mod_base = OTHER; note = 2'O-methyl-guanosine
  modified_base 2: mod_base = OTHER; note = 2'O-methyl-guanosine
  modified_base 3: mod_base = OTHER; note = 2'O-methyl-uridine
  modified_base 4: mod_base = OTHER; note = 2'O-methyl-guanosine
  modified_base 5: mod_base = OTHER; note = 2'O-methyl-adenosine
  modified_base 6: mod_base = OTHER; note = 2'Fluoro-adenosine
  modified_base 7: mod_base = OTHER; note = 2' Fluoro-uridine
  modified_base 8: mod_base = OTHER; note = 2'O-methyl-adenosine
  modified_base 9: mod_base = OTHER; note = 2'Fluoro-adenosine
  modified_base 10: mod_base = OTHER; note = 2'Fluoro-adenosine
  modified_base 11: mod_base = OTHER; note = 2' Fluoro-uridine
  modified_base 12: mod_base = OTHER; note = 2' Fluoro-uridine
  modified_base 13: mod_base = OTHER; note = 2'O-methyl-cytidine
  modified_base 14: mod_base = OTHER; note = 2'O-methyl-cytidine
  modified_base 15: mod_base = OTHER; note = 2'O-methyl-cytidine
  modified_base 16: mod_base = OTHER; note = 2'O-methyl-adenosine
  modified_base 17: mod_base = OTHER; note = 2'O-methyl-guanosine
  modified_base 18: mod_base = OTHER; note = 2'O-methyl-uridine
  modified_base 19: mod_base = OTHER; note = 2'O-methyl-guanosine
  modified_base 20: mod_base = OTHER; note = 2'O-methyl-guanosine
  modified_base 21: mod_base = OTHER; note = 2'O-methyl-adenosine
  modified_base 1..2: mod_base = OTHER; note = phosphorothioate linkage
  modified_base 2..3: mod_base = OTHER; note = phosphorothioate linkage
  source 1..21: mol_type = other RNA
ggtgaataaattcccagtgga

SEQ ID NO: 308 - RNA, 21 nt, synthetic construct
  misc_feature 1..21: note = Description of origin: HCII siRNA sense strands
  misc_feature 1..21: note = Description of source:Sense strand ID:
  modified_base 1: mod_base = OTHER; note = 2'O-methyl-uridine
  modified_base 2: mod_base = OTHER; note = 2'O-methyl-cytidine
  modified_base 3: mod_base = OTHER; note = 2'O-methyl-adenosine
  modified_base 4: mod_base = OTHER; note = 2'O-methyl-guanosine
  modified_base 5: mod_base = OTHER; note = 2'O-methyl-guanosine
  modified_base 6: mod_base = OTHER; note = 2'Fluoro-adenosine
  modified_base 7: mod_base = OTHER; note = 2' Fluoro-guanosine
  modified_base 8: mod_base = OTHER; note = 2'O-methyl-guanosine
  modified_base 9: mod_base = OTHER; note = 2'Fluoro-adenosine
  modified_base 10: mod_base = OTHER; note = 2'Fluoro-adenosine
  modified_base 11: mod_base = OTHER; note = 2' Fluoro-uridine
  modified_base 12: mod_base = OTHER; note = 2' Fluoro-uridine
  modified_base 13: mod_base = OTHER; note = 2'O-methyl-uridine
  modified_base 14: mod_base = OTHER; note = 2'O-methyl-uridine
  modified_base 15: mod_base = OTHER; note = 2'O-methyl-guanosine
  modified_base 16: mod_base = OTHER; note = 2'O-methyl-guanosine
  modified_base 17: mod_base = OTHER; note = 2'O-methyl-guanosine
  modified_base 18: mod_base = OTHER; note = 2'O-methyl-uridine
  modified_base 19: mod_base = OTHER; note = 2'O-methyl-adenosine
  modified_base 20: mod_base = OTHER; note = 2'O-methyl-cytidine
  modified_base 21: mod_base = OTHER; note = 2'O-methyl-adenosine
  modified_base 1..2: mod_base = OTHER; note = phosphorothioate linkage
  modified_base 2..3: mod_base = OTHER; note = phosphorothioate linkage
  source 1..21: mol_type = other RNA
tcaggaggaattttgggtaca

SEQ ID NO: 309 - RNA, 21 nt, synthetic construct
  misc_feature 1..21: note = Description of origin: HCII siRNA sense strands
  misc_feature 1..21: note = Description of source:Sense strand ID:
  modified_base 1: mod_base = OTHER; note = 2'O-methyl-guanosine
  modified_base 2: mod_base = OTHER; note = 2'O-methyl-cytidine
  modified_base 3: mod_base = OTHER; note = 2'O-methyl-uridine
  modified_base 4: mod_base = OTHER; note = 2'O-methyl-guanosine
  modified_base 5: mod_base = OTHER; note = 2'O-methyl-cytidine
  modified_base 6: mod_base = OTHER; note = 2' Fluoro-cytidine
  modified_base 7: mod_base = OTHER; note = 2' Fluoro-uridine
  modified_base 8: mod_base = OTHER; note = 2'O-methyl-guanosine
  modified_base 9: mod_base = OTHER; note = 2' Fluoro-cytidine
  modified_base 10: mod_base = OTHER; note = 2' Fluoro-uridine
  modified_base 11: mod_base = OTHER; note = 2' Fluoro-cytidine
  modified_base 12: mod_base = OTHER; note = 2' Fluoro-uridine
  modified_base 13: mod_base = OTHER; note = 2'O-methyl-uridine
  modified_base 14: mod_base = OTHER; note = 2'O-methyl-cytidine
  modified_base 15: mod_base = OTHER; note = 2'O-methyl-adenosine
  modified_base 16: mod_base = OTHER; note = 2'O-methyl-uridine
  modified_base 17: mod_base = OTHER; note = 2'O-methyl-guanosine
  modified_base 18: mod_base = OTHER; note = 2'O-methyl-guanosine
  modified_base 19: mod_base = OTHER; note = 2'O-methyl-guanosine
  modified_base 20: mod_base = OTHER; note = 2'O-methyl-adenosine
  modified_base 21: mod_base = OTHER; note = 2'O-methyl-adenosine
  modified_base 1..2: mod_base = OTHER; note = phosphorothioate linkage
  modified_base 2..3: mod_base = OTHER; note = phosphorothioate linkage
  source 1..21: mol_type = other RNA
gctgcctgctcttcatgggaa

SEQ ID NO: 310 - RNA, 21 nt, synthetic construct
  misc_feature 1..21: note = Description of origin: HCII siRNA sense strands
  misc_feature 1..21: note = Description of source:Sense strand ID:
  modified_base 1: mod_base = OTHER; note = 2'O-methyl-cytidine
  modified_base 2: mod_base = OTHER; note = 2'O-methyl-adenosine
  modified_base 3: mod_base = OTHER; note = 2'O-methyl-cytidine
  modified_base 4: mod_base = OTHER; note = 2'O-methyl-cytidine
  modified_base 5: mod_base = OTHER; note = 2'O-methyl-adenosine
  modified_base 6: mod_base = OTHER; note = 2'Fluoro-adenosine
  modified_base 7: mod_base = OTHER; note = 2' Fluoro-guanosine
  modified_base 8: mod_base = OTHER; note = 2'O-methyl-guanosine
  modified_base 9: mod_base = OTHER; note = 2' Fluoro-guanosine
  modified_base 10: mod_base = OTHER; note = 2' Fluoro-cytidine
  modified_base 11: mod_base = OTHER; note = 2' Fluoro-cytidine
  modified_base 12: mod_base = OTHER; note = 2' Fluoro-uridine
  modified_base 13: mod_base = OTHER; note = 2'O-methyl-cytidine
  modified_base 14: mod_base = OTHER; note = 2'O-methyl-adenosine
  modified_base 15: mod_base = OTHER; note = 2'O-methyl-uridine
  modified_base 16: mod_base = OTHER; note = 2'O-methyl-adenosine
  modified_base 17: mod_base = OTHER; note = 2'O-methyl-adenosine
  modified_base 18: mod_base = OTHER; note = 2'O-methyl-adenosine
  modified_base 19: mod_base = OTHER; note = 2'O-methyl-adenosine
  modified_base 20: mod_base = OTHER; note = 2'O-methyl-guanosine
  modified_base 21: mod_base = OTHER; note = 2'O-methyl-adenosine
  modified_base 1..2: mod_base = OTHER; note = phosphorothioate linkage
  modified_base 2..3: mod_base = OTHER; note = phosphorothioate linkage
  source 1..21: mol_type = other RNA
caccaagggcctcataaaaga

SEQ ID NO: 311 - RNA, 21 nt, synthetic construct
  misc_feature 1..21: note = Description of origin: HCII siRNA sense strands
  misc_feature 1..21: note = Description of source:Sense strand ID:
  modified_base 1: mod_base = OTHER; note = 2'O-methyl-cytidine
  modified_base 2: mod_base = OTHER; note = 2'O-methyl-cytidine
  modified_base 3: mod_base = OTHER; note = 2'O-methyl-uridine
  modified_base 4: mod_base = OTHER; note = 2'O-methyl-uridine
  modified_base 5: mod_base = OTHER; note = 2'O-methyl-uridine
  modified_base 6: mod_base = OTHER; note = 2'Fluoro-adenosine
  modified_base 7: mod_base = OTHER; note = 2' Fluoro-uridine
  modified_base 8: mod_base = OTHER; note = 2'O-methyl-adenosine
  modified_base 9: mod_base = OTHER; note = 2' Fluoro-uridine
  modified_base 10: mod_base = OTHER; note = 2' Fluoro-cytidine
  modified_base 11: mod_base = OTHER; note = 2' Fluoro-cytidine
  modified_base 12: mod_base = OTHER; note = 2'Fluoro-adenosine
  modified_base 13: mod_base = OTHER; note = 2'O-methyl-guanosine
  modified_base 14: mod_base = OTHER; note = 2'O-methyl-adenosine
  modified_base 15: mod_base = OTHER; note = 2'O-methyl-adenosine
  modified_base 16: mod_base = OTHER; note = 2'O-methyl-guanosine
  modified_base 17: mod_base = OTHER; note = 2'O-methyl-cytidine
  modified_base 18: mod_base = OTHER; note = 2'O-methyl-adenosine
  modified_base 19: mod_base = OTHER; note = 2'O-methyl-guanosine
  modified_base 20: mod_base = OTHER; note = 2'O-methyl-uridine
  modified_base 21: mod_base = OTHER; note = 2'O-methyl-uridine
  modified_base 1..2: mod_base = OTHER; note = phosphorothioate linkage
  modified_base 2..3: mod_base = OTHER; note = phosphorothioate linkage
  source 1..21: mol_type = other RNA
cctttatatccagaagcagtt

SEQ ID NO: 312 - RNA, 21 nt, synthetic construct
  misc_feature 1..21: note = Description of origin: HCII siRNA sense strands
  misc_feature 1..21: note = Description of source:Sense strand ID:
  modified_base 1: mod_base = OTHER; note = 2'O-methyl-cytidine
  modified_base 2: mod_base = OTHER; note = 2'O-methyl-adenosine
  modified_base 3: mod_base = OTHER; note = 2'O-methyl-adenosine
  modified_base 4: mod_base = OTHER; note = 2'O-methyl-cytidine
  modified_base 5: mod_base = OTHER; note = 2'O-methyl-uridine
  modified_base 6: mod_base = OTHER; note = 2' Fluoro-guanosine
  modified_base 7: mod_base = OTHER; note = 2' Fluoro-cytidine
  modified_base 8: mod_base = OTHER; note = 2'O-methyl-adenosine
  modified_base 9: mod_base = OTHER; note = 2' Fluoro-uridine
  modified_base 10: mod_base = OTHER; note = 2' Fluoro-cytidine
  modified_base 11: mod_base = OTHER; note = 2' Fluoro-uridine
  modified_base 12: mod_base = OTHER; note = 2'Fluoro-adenosine
  modified_base 13: mod_base = OTHER; note = 2'O-methyl-cytidine
  modified_base 14: mod_base = OTHER; note = 2'O-methyl-uridine
  modified_base 15: mod_base = OTHER; note = 2'O-methyl-uridine
  modified_base 16: mod_base = OTHER; note = 2'O-methyl-cytidine
  modified_base 17: mod_base = OTHER; note = 2'O-methyl-adenosine
  modified_base 18: mod_base = OTHER; note = 2'O-methyl-adenosine
  modified_base 19: mod_base = OTHER; note = 2'O-methyl-adenosine
  modified_base 20: mod_base = OTHER; note = 2'O-methyl-guanosine
  modified_base 21: mod_base = OTHER; note = 2'O-methyl-guanosine
  modified_base 1..2: mod_base = OTHER; note = phosphorothioate linkage
  modified_base 2..3: mod_base = OTHER; note = phosphorothioate linkage
  source 1..21: mol_type = other RNA
caactgcatctacttcaaagg

SEQ ID NO: 313 - RNA, 21 nt, synthetic construct
  misc_feature 1..21: note = Description of origin: HCII siRNA sense strands
  misc_feature 1..21: note = Description of source:Sense strand ID:
  modified_base 1: mod_base = OTHER; note = 2'O-methyl-guanosine
  modified_base 2: mod_base = OTHER; note = 2'O-methyl-adenosine
  modified_base 3: mod_base = OTHER; note = 2'O-methyl-guanosine
  modified_base 4: mod_base = OTHER; note = 2'O-methyl-cytidine
  modified_base 5: mod_base = OTHER; note = 2'O-methyl-cytidine
  modified_base 6: mod_base = OTHER; note = 2' Fluoro-guanosine
  modified_base 7: mod_base = OTHER; note = 2' Fluoro-guanosine
  modified_base 8: mod_base = OTHER; note = 2'O-methyl-adenosine
  modified_base 9: mod_base = OTHER; note = 2' Fluoro-uridine
  modified_base 10: mod_base = OTHER; note = 2' Fluoro-cytidine
  modified_base 11: mod_base = OTHER; note = 2' Fluoro-cytidine
  modified_base 12: mod_base = OTHER; note = 2'Fluoro-adenosine
  modified_base 13: mod_base = OTHER; note = 2'O-methyl-guanosine
  modified_base 14: mod_base = OTHER; note = 2'O-methyl-cytidine
  modified_base 15: mod_base = OTHER; note = 2'O-methyl-guanosine
  modified_base 16: mod_base = OTHER; note = 2'O-methyl-uridine
  modified_base 17: mod_base = OTHER; note = 2'O-methyl-cytidine
  modified_base 18: mod_base = OTHER; note = 2'O-methyl-uridine
  modified_base 19: mod_base = OTHER; note = 2'O-methyl-uridine
  modified_base 20: mod_base = OTHER; note = 2'O-methyl-adenosine
  modified_base 21: mod_base = OTHER; note = 2'O-methyl-adenosine
  modified_base 1..2: mod_base = OTHER; note = phosphorothioate linkage
  modified_base 2..3: mod_base = OTHER; note = phosphorothioate linkage
  source 1..21: mol_type = other RNA
gagccggatccagcgtcttaa

SEQ ID NO: 314 - RNA, 21 nt, synthetic construct
  misc_feature 1..21: note = Description of origin: HCII siRNA sense strands
  misc_feature 1..21: note = Description of source:Sense strand ID:
  modified_base 1: mod_base = OTHER; note = 2'O-methyl-adenosine
  modified_base 2: mod_base = OTHER; note = 2'O-methyl-uridine
  modified_base 3: mod_base = OTHER; note = 2'O-methyl-cytidine
  modified_base 4: mod_base = OTHER; note = 2'O-methyl-cytidine
  modified_base 5: mod_base = OTHER; note = 2'O-methyl-adenosine
  modified_base 6: mod_base = OTHER; note = 2' Fluoro-guanosine
  modified_base 7: mod_base = OTHER; note = 2' Fluoro-cytidine
  modified_base 8: mod_base = OTHER; note = 2'O-methyl-guanosine
  modified_base 9: mod_base = OTHER; note = 2' Fluoro-uridine
  modified_base 10: mod_base = OTHER; note = 2' Fluoro-cytidine
  modified_base 11: mod_base = OTHER; note = 2' Fluoro-uridine
  modified_base 12: mod_base = OTHER; note = 2' Fluoro-uridine
  modified_base 13: mod_base = OTHER; note = 2'O-methyl-adenosine
  modified_base 14: mod_base = OTHER; note = 2'O-methyl-adenosine
  modified_base 15: mod_base = OTHER; note = 2'O-methyl-cytidine
  modified_base 16: mod_base = OTHER; note = 2'O-methyl-adenosine
  modified_base 17: mod_base = OTHER; note = 2'O-methyl-uridine
  modified_base 18: mod_base = OTHER; note = 2'O-methyl-cytidine
  modified_base 19: mod_base = OTHER; note = 2'O-methyl-cytidine
  modified_base 20: mod_base = OTHER; note = 2'O-methyl-uridine
  modified_base 21: mod_base = OTHER; note = 2'O-methyl-cytidine
  modified_base 1..2: mod_base = OTHER; note = phosphorothioate linkage
  modified_base 2..3: mod_base = OTHER; note = phosphorothioate linkage
  source 1..21: mol_type = other RNA
atccagcgtcttaacatcctc

SEQ ID NO: 315 - RNA, 21 nt, synthetic construct
  misc_feature 1..21: note = Description of origin: HCII siRNA sense strands
  misc_feature 1..21: note = Description of source:Sense strand ID:
  modified_base 1: mod_base = OTHER; note = 2'O-methyl-cytidine
  modified_base 2: mod_base = OTHER; note = 2'O-methyl-adenosine
  modified_base 3: mod_base = OTHER; note = 2'O-methyl-adenosine
  modified_base 4: mod_base = OTHER; note = 2'O-methyl-adenosine
  modified_base 5: mod_base = OTHER; note = 2'O-methyl-adenosine
  modified_base 6: mod_base = OTHER; note = 2'Fluoro-adenosine
  modified_base 7: mod_base = OTHER; note = 2'Fluoro-adenosine
  modified_base 8: mod_base = OTHER; note = 2'O-methyl-guanosine
  modified_base 9: mod_base = OTHER; note = 2' Fluoro-cytidine
  modified_base 10: mod_base = OTHER; note = 2'Fluoro-adenosine
  modified_base 11: mod_base = OTHER; note = 2' Fluoro-uridine
  modified_base 12: mod_base = OTHER; note = 2' Fluoro-guanosine
  modified_base 13: mod_base = OTHER; note = 2'O-methyl-adenosine
  modified_base 14: mod_base = OTHER; note = 2'O-methyl-cytidine
  modified_base 15: mod_base = OTHER; note = 2'O-methyl-adenosine
  modified_base 16: mod_base = OTHER; note = 2'O-methyl-adenosine
  modified_base 17: mod_base = OTHER; note = 2'O-methyl-adenosine
  modified_base 18: mod_base = OTHER; note = 2'O-methyl-cytidine
  modified_base 19: mod_base = OTHER; note = 2'O-methyl-adenosine
  modified_base 20: mod_base = OTHER; note = 2'O-methyl-guanosine
  modified_base 21: mod_base = OTHER; note = 2'O-methyl-adenosine
  modified_base 1..2: mod_base = OTHER; note = phosphorothioate linkage
  modified_base 2..3: mod_base = OTHER; note = phosphorothioate linkage
  source 1..21: mol_type = other RNA
caaaaaagcatgacaaacaga

SEQ ID NO: 316 - RNA, 21 nt, synthetic construct
  misc_feature 1..21: note = Description of origin: HCII siRNA sense strands
  misc_feature 1..21: note = Description of source:Sense strand ID:
  modified_base 1: mod_base = OTHER; note = 2'O-methyl-cytidine
  modified_base 2: mod_base = OTHER; note = 2'O-methyl-adenosine
  modified_base 3: mod_base = OTHER; note = 2'O-methyl-guanosine
  modified_base 4: mod_base = OTHER; note = 2'O-methyl-guanosine
  modified_base 5: mod_base = OTHER; note = 2'O-methyl-adenosine
  modified_base 6: mod_base = OTHER; note = 2' Fluoro-guanosine
  modified_base 7: mod_base = OTHER; note = 2' Fluoro-guanosine
  modified_base 8: mod_base = OTHER; note = 2'O-methyl-adenosine
  modified_base 9: mod_base = OTHER; note = 2'Fluoro-adenosine
  modified_base 10: mod_base = OTHER; note = 2' Fluoro-uridine
  modified_base 11: mod_base = OTHER; note = 2' Fluoro-uridine
  modified_base 12: mod_base = OTHER; note = 2' Fluoro-uridine
  modified_base 13: mod_base = OTHER; note = 2'O-methyl-uridine
  modified_base 14: mod_base = OTHER; note = 2'O-methyl-guanosine
  modified_base 15: mod_base = OTHER; note = 2'O-methyl-guanosine
  modified_base 16: mod_base = OTHER; note = 2'O-methyl-guanosine
  modified_base 17: mod_base = OTHER; note = 2'O-methyl-uridine
  modified_base 18: mod_base = OTHER; note = 2'O-methyl-adenosine
  modified_base 19: mod_base = OTHER; note = 2'O-methyl-cytidine
  modified_base 20: mod_base = OTHER; note = 2'O-methyl-adenosine
  modified_base 21: mod_base = OTHER; note = 2'O-methyl-cytidine
  modified_base 1..2: mod_base = OTHER; note = phosphorothioate linkage
  modified_base 2..3: mod_base = OTHER; note = phosphorothioate linkage
  source 1..21: mol_type = other RNA
caggaggaattttgggtacac

SEQ ID NO: 317 - RNA, 21 nt, synthetic construct
  misc_feature 1..21: note = Description of origin: HCII siRNA sense strands
  misc_feature 1..21: note = Description of source:Sense strand ID:
  modified_base 1: mod_base = OTHER; note = 2'O-methyl-cytidine
  modified_base 2: mod_base = OTHER; note = 2'O-methyl-adenosine
  modified_base 3: mod_base = OTHER; note = 2'O-methyl-adenosine
  modified_base 4: mod_base = OTHER; note = 2'O-methyl-cytidine
  modified_base 5: mod_base = OTHER; note = 2'O-methyl-cytidine
  modified_base 6: mod_base = OTHER; note = 2'Fluoro-adenosine
  modified_base 7: mod_base = OTHER; note = 2' Fluoro-cytidine
  modified_base 8: mod_base = OTHER; note = 2'O-methyl-adenosine
  modified_base 9: mod_base = OTHER; note = 2'Fluoro-adenosine
  modified_base 10: mod_base = OTHER; note = 2' Fluoro-cytidine
  modified_base 11: mod_base = OTHER; note = 2' Fluoro-uridine
  modified_base 12: mod_base = OTHER; note = 2' Fluoro-uridine
  modified_base 13: mod_base = OTHER; note = 2'O-methyl-cytidine
  modified_base 14: mod_base = OTHER; note = 2'O-methyl-cytidine
  modified_base 15: mod_base = OTHER; note = 2'O-methyl-guanosine
  modified_base 16: mod_base = OTHER; note = 2'O-methyl-guanosine
  modified_base 17: mod_base = OTHER; note = 2'O-methyl-cytidine
  modified_base 18: mod_base = OTHER; note = 2'O-methyl-uridine
  modified_base 19: mod_base = OTHER; note = 2'O-methyl-guanosine
  modified_base 20: mod_base = OTHER; note = 2'O-methyl-adenosine
  modified_base 21: mod_base = OTHER; note = 2'O-methyl-adenosine
  modified_base 1..2: mod_base = OTHER; note = phosphorothioate linkage
  modified_base 2..3: mod_base = OTHER; note = phosphorothioate linkage
  source 1..21: mol_type = other RNA
caaccacaacttccggctgaa

SEQ ID NO: 318 - RNA, 21 nt, synthetic construct
  misc_feature 1..21: note = Description of origin: HCII siRNA sense strands
  misc_feature 1..21: note = Description of source:Sense strand ID:
  modified_base 1: mod_base = OTHER; note = 2'O-methyl-guanosine
  modified_base 2: mod_base = OTHER; note = 2'O-methyl-guanosine
  modified_base 3: mod_base = OTHER; note = 2'O-methyl-cytidine
  modified_base 4: mod_base = OTHER; note = 2'O-methyl-adenosine
  modified_base 5: mod_base = OTHER; note = 2'O-methyl-adenosine
  modified_base 6: mod_base = OTHER; note = 2'Fluoro-adenosine
  modified_base 7: mod_base = OTHER; note = 2'Fluoro-adenosine
  modified_base 8: mod_base = OTHER; note = 2'O-methyl-adenosine
  modified_base 9: mod_base = OTHER; note = 2'Fluoro-adenosine
  modified_base 10: mod_base = OTHER; note = 2' Fluoro-guanosine
  modified_base 11: mod_base = OTHER; note = 2' Fluoro-cytidine
  modified_base 12: mod_base = OTHER; note = 2'Fluoro-adenosine
  modified_base 13: mod_base = OTHER; note = 2'O-methyl-uridine
  modified_base 14: mod_base = OTHER; note = 2'O-methyl-guanosine
  modified_base 15: mod_base = OTHER; note = 2'O-methyl-adenosine
  modified_base 16: mod_base = OTHER; note = 2'O-methyl-cytidine
  modified_base 17: mod_base = OTHER; note = 2'O-methyl-adenosine
  modified_base 18: mod_base = OTHER; note = 2'O-methyl-adenosine
  modified_base 19: mod_base = OTHER; note = 2'O-methyl-adenosine
  modified_base 20: mod_base = OTHER; note = 2'O-methyl-cytidine
  modified_base 21: mod_base = OTHER; note = 2'O-methyl-adenosine
  modified_base 1..2: mod_base = OTHER; note = phosphorothioate linkage
  modified_base 2..3: mod_base = OTHER; note = phosphorothioate linkage
  source 1..21: mol_type = other RNA
ggcaaaaaagcatgacaaaca

SEQ ID NO: 319 - RNA, 21 nt, synthetic construct
  misc_feature 1..21: note = Description of origin: HCII siRNA sense strands
  misc_feature 1..21: note = Description of source:Sense strand ID:
  modified_base 1: mod_base = OTHER; note = 2'O-methyl-guanosine
  modified_base 2: mod_base = OTHER; note = 2'O-methyl-adenosine
  modified_base 3: mod_base = OTHER; note = 2'O-methyl-adenosine
  modified_base 4: mod_base = OTHER; note = 2'O-methyl-uridine
  modified_base 5: mod_base = OTHER; note = 2'O-methyl-adenosine
  modified_base 6: mod_base = OTHER; note = 2'Fluoro-adenosine
  modified_base 7: mod_base = OTHER; note = 2'Fluoro-adenosine
  modified_base 8: mod_base = OTHER; note = 2'O-methyl-uridine
  modified_base 9: mod_base = OTHER; note = 2' Fluoro-uridine
  modified_base 10: mod_base = OTHER; note = 2' Fluoro-cytidine
  modified_base 11: mod_base = OTHER; note = 2' Fluoro-cytidine
  modified_base 12: mod_base = OTHER; note = 2' Fluoro-cytidine
  modified_base 13: mod_base = OTHER; note = 2'O-methyl-adenosine
  modified_base 14: mod_base = OTHER; note = 2'O-methyl-guanosine
  modified_base 15: mod_base = OTHER; note = 2'O-methyl-uridine
  modified_base 16: mod_base = OTHER; note = 2'O-methyl-guanosine
  modified_base 17: mod_base = OTHER; note = 2'O-methyl-guanosine
  modified_base 18: mod_base = OTHER; note = 2'O-methyl-adenosine
  modified_base 19: mod_base = OTHER; note = 2'O-methyl-adenosine
  modified_base 20: mod_base = OTHER; note = 2'O-methyl-adenosine
  modified_base 21: mod_base = OTHER; note = 2'O-methyl-uridine
  modified_base 1..2: mod_base = OTHER; note = phosphorothioate linkage
  modified_base 2..3: mod_base = OTHER; note = phosphorothioate linkage
  source 1..21: mol_type = other RNA
gaataaattcccagtggaaat

SEQ ID NO: 320 - RNA, 21 nt, synthetic construct
  misc_feature 1..21: note = Description of origin: HCII siRNA sense strands
  misc_feature 1..21: note = Description of source:Sense strand ID:
  modified_base 1: mod_base = OTHER; note = 2'O-methyl-guanosine
  modified_base 2: mod_base = OTHER; note = 2'O-methyl-guanosine
  modified_base 3: mod_base = OTHER; note = 2'O-methyl-guanosine
  modified_base 4: mod_base = OTHER; note = 2'O-methyl-cytidine
  modified_base 5: mod_base = OTHER; note = 2'O-methyl-adenosine
  modified_base 6: mod_base = OTHER; note = 2' Fluoro-uridine
  modified_base 7: mod_base = OTHER; note = 2' Fluoro-cytidine
  modified_base 8: mod_base = OTHER; note = 2'O-methyl-adenosine
  modified_base 9: mod_base = OTHER; note = 2' Fluoro-guanosine
  modified_base 10: mod_base = OTHER; note = 2' Fluoro-cytidine
  modified_base 11: mod_base = OTHER; note = 2'Fluoro-adenosine
  modified_base 12: mod_base = OTHER; note = 2' Fluoro-uridine
  modified_base 13: mod_base = OTHER; note = 2'O-methyl-guanosine
  modified_base 14: mod_base = OTHER; note = 2'O-methyl-cytidine
  modified_base 15: mod_base = OTHER; note = 2'O-methyl-uridine
  modified_base 16: mod_base = OTHER; note = 2'O-methyl-adenosine
  modified_base 17: mod_base = OTHER; note = 2'O-methyl-adenosine
  modified_base 18: mod_base = OTHER; note = 2'O-methyl-uridine
  modified_base 19: mod_base = OTHER; note = 2'O-methyl-uridine
  modified_base 20: mod_base = OTHER; note = 2'O-methyl-guanosine
  modified_base 21: mod_base = OTHER; note = 2'O-methyl-uridine
  modified_base 1..2: mod_base = OTHER; note = phosphorothioate linkage
  modified_base 2..3: mod_base = OTHER; note = phosphorothioate linkage
  source 1..21: mol_type = other RNA
gggcatcagcatgctaattgt

SEQ ID NO: 321 - RNA, 21 nt, synthetic construct
  misc_feature 1..21: note = Description of origin: HCII siRNA sense strands
  misc_feature 1..21: note = Description of source:Sense strand ID:
  modified_base 1: mod_base = OTHER; note = 2'O-methyl-adenosine
  modified_base 2: mod_base = OTHER; note = 2'O-methyl-adenosine
  modified_base 3: mod_base = OTHER; note = 2'O-methyl-adenosine
  modified_base 4: mod_base = OTHER; note = 2'O-methyl-adenosine
  modified_base 5: mod_base = OTHER; note = 2'O-methyl-adenosine
  modified_base 6: mod_base = OTHER; note = 2' Fluoro-guanosine
  modified_base 7: mod_base = OTHER; note = 2' Fluoro-cytidine
  modified_base 8: mod_base = OTHER; note = 2'O-methyl-adenosine
  modified_base 9: mod_base = OTHER; note = 2' Fluoro-uridine
  modified_base 10: mod_base = OTHER; note = 2' Fluoro-guanosine
  modified_base 11: mod_base = OTHER; note = 2'Fluoro-adenosine
  modified_base 12: mod_base = OTHER; note = 2' Fluoro-cytidine
  modified_base 13: mod_base = OTHER; note = 2'O-methyl-adenosine
  modified_base 14: mod_base = OTHER; note = 2'O-methyl-adenosine
  modified_base 15: mod_base = OTHER; note = 2'O-methyl-adenosine
  modified_base 16: mod_base = OTHER; note = 2'O-methyl-cytidine
  modified_base 17: mod_base = OTHER; note = 2'O-methyl-adenosine
  modified_base 18: mod_base = OTHER; note = 2'O-methyl-guanosine
  modified_base 19: mod_base = OTHER; note = 2'O-methyl-adenosine
  modified_base 20: mod_base = OTHER; note = 2'O-methyl-adenosine
  modified_base 21: mod_base = OTHER; note = 2'O-methyl-cytidine
  modified_base 1..2: mod_base = OTHER; note = phosphorothioate linkage
  modified_base 2..3: mod_base = OTHER; note = phosphorothioate linkage
  source 1..21: mol_type = other RNA
aaaaagcatgacaaacagaac

SEQ ID NO: 322 - RNA, 21 nt, synthetic construct
  misc_feature 1..21: note = Description of origin: HCII siRNA sense strands
  misc_feature 1..21: note = Description of source:Sense strand ID:
  modified_base 1: mod_base = OTHER; note = 2'O-methyl-guanosine
  modified_base 2: mod_base = OTHER; note = 2'O-methyl-adenosine
  modified_base 3: mod_base = OTHER; note = 2'O-methyl-guanosine
  modified_base 4: mod_base = OTHER; note = 2'O-methyl-uridine
  modified_base 5: mod_base = OTHER; note = 2'O-methyl-adenosine
  modified_base 6: mod_base = OTHER; note = 2' Fluoro-uridine
  modified_base 7: mod_base = OTHER; note = 2' Fluoro-uridine
  modified_base 8: mod_base = OTHER; note = 2'O-methyl-adenosine
  modified_base 9: mod_base = OTHER; note = 2' Fluoro-cytidine
  modified_base 10: mod_base = OTHER; note = 2' Fluoro-uridine
  modified_base 11: mod_base = OTHER; note = 2' Fluoro-uridine
  modified_base 12: mod_base = OTHER; note = 2' Fluoro-uridine
  modified_base 13: mod_base = OTHER; note = 2'O-methyl-guanosine
  modified_base 14: mod_base = OTHER; note = 2'O-methyl-cytidine
  modified_base 15: mod_base = OTHER; note = 2'O-methyl-uridine
  modified_base 16: mod_base = OTHER; note = 2'O-methyl-guanosine
  modified_base 17: mod_base = OTHER; note = 2'O-methyl-adenosine
  modified_base 18: mod_base = OTHER; note = 2'O-methyl-guanosine
  modified_base 19: mod_base = OTHER; note = 2'O-methyl-guanosine
  modified_base 20: mod_base = OTHER; note = 2'O-methyl-cytidine
  modified_base 21: mod_base = OTHER; note = 2'O-methyl-cytidine
  modified_base 1..2: mod_base = OTHER; note = phosphorothioate linkage
  modified_base 2..3: mod_base = OTHER; note = phosphorothioate linkage
  source 1..21: mol_type = other RNA
gagtattactttgctgaggcc

SEQ ID NO: 323 - RNA, 21 nt, synthetic construct
  misc_feature 1..21: note = Description of origin: HCII siRNA sense strands
  misc_feature 1..21: note = Description of source:Sense strand ID:
  modified_base 1: mod_base = OTHER; note = 2'O-methyl-uridine
  modified_base 2: mod_base = OTHER; note = 2'O-methyl-guanosine
  modified_base 3: mod_base = OTHER; note = 2'O-methyl-adenosine
  modified_base 4: mod_base = OTHER; note = 2'O-methyl-adenosine
  modified_base 5: mod_base = OTHER; note = 2'O-methyl-uridine
  modified_base 6: mod_base = OTHER; note = 2'O-methyl-adenosine
  modified_base 7: mod_base = OTHER; note = 2'Fluoro-adenosine
  modified_base 8: mod_base = OTHER; note = 2'O-methyl-adenosine
  modified_base 9: mod_base = OTHER; note = 2' Fluoro-uridine
  modified_base 10: mod_base = OTHER; note = 2' Fluoro-uridine
  modified_base 11: mod_base = OTHER; note = 2' Fluoro-cytidine
  modified_base 12: mod_base = OTHER; note = 2' Fluoro-cytidine
  modified_base 13: mod_base = OTHER; note = 2'O-methyl-cytidine
  modified_base 14: mod_base = OTHER; note = 2'O-methyl-adenosine
  modified_base 15: mod_base = OTHER; note = 2'O-methyl-guanosine
  modified_base 16: mod_base = OTHER; note = 2'O-methyl-uridine
  modified_base 17: mod_base = OTHER; note = 2'O-methyl-guanosine
  modified_base 18: mod_base = OTHER; note = 2'O-methyl-guanosine
  modified_base 19: mod_base = OTHER; note = 2'O-methyl-adenosine
  modified_base 20: mod_base = OTHER; note = 2'O-methyl-adenosine
  modified_base 21: mod_base = OTHER; note = 2'O-methyl-adenosine
  modified_base 1..2: mod_base = OTHER; note = phosphorothioate linkage
  modified_base 2..3: mod_base = OTHER; note = phosphorothioate linkage
  source 1..21: mol_type = other RNA
tgaataaattcccagtggaaa

SEQ ID NO: 324 - RNA, 21 nt, synthetic construct
  misc_feature 1..21: note = Description of origin: HCII siRNA sense strands
  misc_feature 1..21: note = Description of source:Sense strand ID:
  modified_base 1: mod_base = OTHER; note = 2'O-methyl-cytidine
  modified_base 2: mod_base = OTHER; note = 2'O-methyl-uridine
  modified_base 3: mod_base = OTHER; note = 2'O-methyl-guanosine
  modified_base 4: mod_base = OTHER; note = 2'O-methyl-cytidine
  modified_base 5: mod_base = OTHER; note = 2'O-methyl-adenosine
  modified_base 6: mod_base = OTHER; note = 2'O-methyl-uridine
  modified_base 7: mod_base = OTHER; note = 2' Fluoro-cytidine
  modified_base 8: mod_base = OTHER; note = 2'O-methyl-uridine
  modified_base 9: mod_base = OTHER; note = 2'Fluoro-adenosine
  modified_base 10: mod_base = OTHER; note = 2' Fluoro-cytidine
  modified_base 11: mod_base = OTHER; note = 2' Fluoro-uridine
  modified_base 12: mod_base = OTHER; note = 2' Fluoro-uridine
  modified_base 13: mod_base = OTHER; note = 2'O-methyl-cytidine
  modified_base 14: mod_base = OTHER; note = 2'O-methyl-adenosine
  modified_base 15: mod_base = OTHER; note = 2'O-methyl-adenosine
  modified_base 16: mod_base = OTHER; note = 2'O-methyl-adenosine
  modified_base 17: mod_base = OTHER; note = 2'O-methyl-guanosine
  modified_base 18: mod_base = OTHER; note = 2'O-methyl-guanosine
  modified_base 19: mod_base = OTHER; note = 2'O-methyl-adenosine
  modified_base 20: mod_base = OTHER; note = 2'O-methyl-uridine
  modified_base 21: mod_base = OTHER; note = 2'O-methyl-cytidine
  modified_base 1..2: mod_base = OTHER; note = phosphorothioate linkage
  modified_base 2..3: mod_base = OTHER; note = phosphorothioate linkage
  source 1..21: mol_type = other RNA
ctgcatctacttcaaaggatc

SEQ ID NO: 325 - RNA, 21 nt, synthetic construct
  misc_feature 1..21: note = Description of origin: HCII siRNA sense strands
  misc_feature 1..21: note = Description of source:Sense strand ID:
  modified_base 1: mod_base = OTHER; note = 2'O-methyl-adenosine
  modified_base 2: mod_base = OTHER; note = 2'O-methyl-cytidine
  modified_base 3: mod_base = OTHER; note = 2'O-methyl-uridine
  modified_base 4: mod_base = OTHER; note = 2'O-methyl-guanosine
  modified_base 5: mod_base = OTHER; note = 2'O-methyl-cytidine
  modified_base 6: mod_base = OTHER; note = 2'O-methyl-adenosine
  modified_base 7: mod_base = OTHER; note = 2' Fluoro-uridine
  modified_base 8: mod_base = OTHER; note = 2'O-methyl-cytidine
  modified_base 9: mod_base = OTHER; note = 2' Fluoro-uridine
  modified_base 10: mod_base = OTHER; note = 2'Fluoro-adenosine
  modified_base 11: mod_base = OTHER; note = 2' Fluoro-cytidine
  modified_base 12: mod_base = OTHER; note = 2' Fluoro-uridine
  modified_base 13: mod_base = OTHER; note = 2'O-methyl-uridine
  modified_base 14: mod_base = OTHER; note = 2'O-methyl-cytidine
  modified_base 15: mod_base = OTHER; note = 2'O-methyl-adenosine
  modified_base 16: mod_base = OTHER; note = 2'O-methyl-adenosine
  modified_base 17: mod_base = OTHER; note = 2'O-methyl-adenosine
  modified_base 18: mod_base = OTHER; note = 2'O-methyl-guanosine
  modified_base 19: mod_base = OTHER; note = 2'O-methyl-guanosine
  modified_base 20: mod_base = OTHER; note = 2'O-methyl-adenosine
  modified_base 21: mod_base = OTHER; note = 2'O-methyl-uridine
  modified_base 1..2: mod_base = OTHER; note = phosphorothioate linkage
  modified_base 2..3: mod_base = OTHER; note = phosphorothioate linkage
  source 1..21: mol_type = other RNA
actgcatctacttcaaaggat

SEQ ID NO: 326 - RNA, 21 nt, synthetic construct
  misc_feature 1..21: note = Description of origin: HCII siRNA sense strands
  misc_feature 1..21: note = Description of source:Sense strand ID:
  modified_base 1: mod_base = OTHER; note = 2'O-methyl-guanosine
  modified_base 2: mod_base = OTHER; note = 2'O-methyl-guanosine
  modified_base 3: mod_base = OTHER; note = 2'O-methyl-guanosine
  modified_base 4: mod_base = OTHER; note = 2'O-methyl-adenosine
  modified_base 5: mod_base = OTHER; note = 2'O-methyl-guanosine
  modified_base 6: mod_base = OTHER; note = 2'O-methyl-adenosine
  modified_base 7: mod_base = OTHER; note = 2' Fluoro-guanosine
  modified_base 8: mod_base = OTHER; note = 2'O-methyl-adenosine
  modified_base 9: mod_base = OTHER; note = 2' Fluoro-cytidine
  modified_base 10: mod_base = OTHER; note = 2' Fluoro-cytidine
  modified_base 11: mod_base = OTHER; note = 2' Fluoro-cytidine
  modified_base 12: mod_base = OTHER; note = 2'Fluoro-adenosine
  modified_base 13: mod_base = OTHER; note = 2'O-methyl-uridine
  modified_base 14: mod_base = OTHER; note = 2'O-methyl-guanosine
  modified_base 15: mod_base = OTHER; note = 2'O-methyl-adenosine
  modified_base 16: mod_base = OTHER; note = 2'O-methyl-adenosine
  modified_base 17: mod_base = OTHER; note = 2'O-methyl-cytidine
  modified_base 18: mod_base = OTHER; note = 2'O-methyl-adenosine
  modified_base 19: mod_base = OTHER; note = 2'O-methyl-adenosine
  modified_base 20: mod_base = OTHER; note = 2'O-methyl-guanosine
  modified_base 21: mod_base = OTHER; note = 2'O-methyl-uridine
  modified_base 1..2: mod_base = OTHER; note = phosphorothioate linkage
  modified_base 2..3: mod_base = OTHER; note = phosphorothioate linkage
  source 1..21: mol_type = other RNA
gggagagacccatgaacaagt

SEQ ID NO: 327 - RNA, 21 nt, synthetic construct
  misc_feature 1..21: note = Description of origin: HCII siRNA sense strands
  misc_feature 1..21: note = Description of source:Sense strand ID:
  modified_base 1: mod_base = OTHER; note = 2'O-methyl-guanosine
  modified_base 2: mod_base = OTHER; note = 2'O-methyl-guanosine
  modified_base 3: mod_base = OTHER; note = 2'O-methyl-uridine
  modified_base 4: mod_base = OTHER; note = 2'O-methyl-guanosine
  modified_base 5: mod_base = OTHER; note = 2'O-methyl-adenosine
  modified_base 6: mod_base = OTHER; note = 2'O-methyl-adenosine
  modified_base 7: mod_base = OTHER; note = 2' Fluoro-uridine
  modified_base 8: mod_base = OTHER; note = 2'O-methyl-adenosine
  modified_base 9: mod_base = OTHER; note = 2'Fluoro-adenosine
  modified_base 10: mod_base = OTHER; note = 2'Fluoro-adenosine
  modified_base 11: mod_base = OTHER; note = 2' Fluoro-uridine
  modified_base 12: mod_base = OTHER; note = 2' Fluoro-uridine
  modified_base 13: mod_base = OTHER; note = 2'O-methyl-cytidine
  modified_base 14: mod_base = OTHER; note = 2'O-methyl-cytidine
  modified_base 15: mod_base = OTHER; note = 2'O-methyl-cytidine
  modified_base 16: mod_base = OTHER; note = 2'O-methyl-adenosine
  modified_base 17: mod_base = OTHER; note = 2'O-methyl-guanosine
  modified_base 18: mod_base = OTHER; note = 2'O-methyl-uridine
  modified_base 19: mod_base = OTHER; note = 2'O-methyl-guanosine
  modified_base 20: mod_base = OTHER; note = 2'O-methyl-guanosine
  modified_base 21: mod_base = OTHER; note = 2'O-methyl-adenosine
  modified_base 1..2: mod_base = OTHER; note = phosphorothioate linkage
  modified_base 2..3: mod_base = OTHER; note = phosphorothioate linkage
  source 1..21: mol_type = other RNA
ggtgaataaattcccagtgga

SEQ ID NO: 328 - RNA, 21 nt, synthetic construct
  misc_feature 1..21: note = Description of origin: HCII siRNA sense strands
  misc_feature 1..21: note = Description of source:Sense strand ID:
  modified_base 1: mod_base = OTHER; note = 2'O-methyl-uridine
  modified_base 2: mod_base = OTHER; note = 2'O-methyl-cytidine
  modified_base 3: mod_base = OTHER; note = 2'O-methyl-adenosine
  modified_base 4: mod_base = OTHER; note = 2'O-methyl-guanosine
  modified_base 5: mod_base = OTHER; note = 2'O-methyl-guanosine
  modified_base 6: mod_base = OTHER; note = 2'O-methyl-adenosine
  modified_base 7: mod_base = OTHER; note = 2' Fluoro-guanosine
  modified_base 8: mod_base = OTHER; note = 2'O-methyl-guanosine
  modified_base 9: mod_base = OTHER; note = 2'Fluoro-adenosine
  modified_base 10: mod_base = OTHER; note = 2'Fluoro-adenosine
  modified_base 11: mod_base = OTHER; note = 2' Fluoro-uridine
  modified_base 12: mod_base = OTHER; note = 2' Fluoro-uridine
  modified_base 13: mod_base = OTHER; note = 2'O-methyl-uridine
  modified_base 14: mod_base = OTHER; note = 2'O-methyl-uridine
  modified_base 15: mod_base = OTHER; note = 2'O-methyl-guanosine
  modified_base 16: mod_base = OTHER; note = 2'O-methyl-guanosine
  modified_base 17: mod_base = OTHER; note = 2'O-methyl-guanosine
  modified_base 18: mod_base = OTHER; note = 2'O-methyl-uridine
  modified_base 19: mod_base = OTHER; note = 2'O-methyl-adenosine
  modified_base 20: mod_base = OTHER; note = 2'O-methyl-cytidine
  modified_base 21: mod_base = OTHER; note = 2'O-methyl-adenosine
  modified_base 1..2: mod_base = OTHER; note = phosphorothioate linkage
  modified_base 2..3: mod_base = OTHER; note = phosphorothioate linkage
  source 1..21: mol_type = other RNA
tcaggaggaattttgggtaca

SEQ ID NO: 329 - RNA, 21 nt, synthetic construct
  misc_feature 1..21: note = Description of origin: HCII siRNA sense strands
  misc_feature 1..21: note = Description of source:Sense strand ID:
  modified_base 1: mod_base = OTHER; note = 2'O-methyl-guanosine
  modified_base 2: mod_base = OTHER; note = 2'O-methyl-cytidine
  modified_base 3: mod_base = OTHER; note = 2'O-methyl-uridine
  modified_base 4: mod_base = OTHER; note = 2'O-methyl-guanosine
  modified_base 5: mod_base = OTHER; note = 2'O-methyl-cytidine
  modified_base 6: mod_base = OTHER; note = 2'O-methyl-cytidine
  modified_base 7: mod_base = OTHER; note = 2' Fluoro-uridine
  modified_base 8: mod_base = OTHER; note = 2'O-methyl-guanosine
  modified_base 9: mod_base = OTHER; note = 2' Fluoro-cytidine
  modified_base 10: mod_base = OTHER; note = 2' Fluoro-uridine
  modified_base 11: mod_base = OTHER; note = 2' Fluoro-cytidine
  modified_base 12: mod_base = OTHER; note = 2' Fluoro-uridine
  modified_base 13: mod_base = OTHER; note = 2'O-methyl-uridine
  modified_base 14: mod_base = OTHER; note = 2'O-methyl-cytidine
  modified_base 15: mod_base = OTHER; note = 2'O-methyl-adenosine
  modified_base 16: mod_base = OTHER; note = 2'O-methyl-uridine
  modified_base 17: mod_base = OTHER; note = 2'O-methyl-guanosine
  modified_base 18: mod_base = OTHER; note = 2'O-methyl-guanosine
  modified_base 19: mod_base = OTHER; note = 2'O-methyl-guanosine
  modified_base 20: mod_base = OTHER; note = 2'O-methyl-adenosine
  modified_base 21: mod_base = OTHER; note = 2'O-methyl-adenosine
  modified_base 1..2: mod_base = OTHER; note = phosphorothioate linkage
  modified_base 2..3: mod_base = OTHER; note = phosphorothioate linkage
  source 1..21: mol_type = other RNA
gctgcctgctcttcatgggaa

SEQ ID NO: 330 - RNA, 21 nt, synthetic construct
  misc_feature 1..21: note = Description of origin: HCII siRNA sense strands
  misc_feature 1..21: note = Description of source:Sense strand ID:
  modified_base 1: mod_base = OTHER; note = 2'O-methyl-cytidine
  modified_base 2: mod_base = OTHER; note = 2'O-methyl-adenosine
  modified_base 3: mod_base = OTHER; note = 2'O-methyl-cytidine
  modified_base 4: mod_base = OTHER; note = 2'O-methyl-cytidine
  modified_base 5: mod_base = OTHER; note = 2'O-methyl-adenosine
  modified_base 6: mod_base = OTHER; note = 2'O-methyl-adenosine
  modified_base 7: mod_base = OTHER; note = 2' Fluoro-guanosine
  modified_base 8: mod_base = OTHER; note = 2'O-methyl-guanosine
  modified_base 9: mod_base = OTHER; note = 2' Fluoro-guanosine
  modified_base 10: mod_base = OTHER; note = 2' Fluoro-cytidine
  modified_base 11: mod_base = OTHER; note = 2' Fluoro-cytidine
  modified_base 12: mod_base = OTHER; note = 2' Fluoro-uridine
  modified_base 13: mod_base = OTHER; note = 2'O-methyl-cytidine
  modified_base 14: mod_base = OTHER; note = 2'O-methyl-adenosine
  modified_base 15: mod_base = OTHER; note = 2'O-methyl-uridine
  modified_base 16: mod_base = OTHER; note = 2'O-methyl-adenosine
  modified_base 17: mod_base = OTHER; note = 2'O-methyl-adenosine
  modified_base 18: mod_base = OTHER; note = 2'O-methyl-adenosine
  modified_base 19: mod_base = OTHER; note = 2'O-methyl-adenosine
  modified_base 20: mod_base = OTHER; note = 2'O-methyl-guanosine
  modified_base 21: mod_base = OTHER; note = 2'O-methyl-adenosine
  modified_base 1..2: mod_base = OTHER; note = phosphorothioate linkage
  modified_base 2..3: mod_base = OTHER; note = phosphorothioate linkage
  source 1..21: mol_type = other RNA
caccaagggcctcataaaaga

SEQ ID NO: 331 - RNA, 21 nt, synthetic construct
  misc_feature 1..21: note = Description of origin: HCII siRNA sense strands
  misc_feature 1..21: note = Description of source:Sense strand ID:
  modified_base 1: mod_base = OTHER; note = 2'O-methyl-cytidine
  modified_base 2: mod_base = OTHER; note = 2'O-methyl-cytidine
  modified_base 3: mod_base = OTHER; note = 2'O-methyl-uridine
  modified_base 4: mod_base = OTHER; note = 2'O-methyl-uridine
  modified_base 5: mod_base = OTHER; note = 2'O-methyl-uridine
  modified_base 6: mod_base = OTHER; note = 2'O-methyl-adenosine
  modified_base 7: mod_base = OTHER; note = 2' Fluoro-uridine
  modified_base 8: mod_base = OTHER; note = 2'O-methyl-adenosine
  modified_base 9: mod_base = OTHER; note = 2' Fluoro-uridine
  modified_base 10: mod_base = OTHER; note = 2' Fluoro-cytidine
  modified_base 11: mod_base = OTHER; note = 2' Fluoro-cytidine
  modified_base 12: mod_base = OTHER; note = 2'Fluoro-adenosine
  modified_base 13: mod_base = OTHER; note = 2'O-methyl-guanosine
  modified_base 14: mod_base = OTHER; note = 2'O-methyl-adenosine
  modified_base 15: mod_base = OTHER; note = 2'O-methyl-adenosine
  modified_base 16: mod_base = OTHER; note = 2'O-methyl-guanosine
  modified_base 17: mod_base = OTHER; note = 2'O-methyl-cytidine
  modified_base 18: mod_base = OTHER; note = 2'O-methyl-adenosine
  modified_base 19: mod_base = OTHER; note = 2'O-methyl-guanosine
  modified_base 20: mod_base = OTHER; note = 2'O-methyl-uridine
  modified_base 21: mod_base = OTHER; note = 2'O-methyl-uridine
  modified_base 1..2: mod_base = OTHER; note = phosphorothioate linkage
  modified_base 2..3: mod_base = OTHER; note = phosphorothioate linkage
  source 1..21: mol_type = other RNA
cctttatatccagaagcagtt

SEQ ID NO: 332 - RNA, 21 nt, synthetic construct
  misc_feature 1..21: note = Description of origin: HCII siRNA sense strands
  misc_feature 1..21: note = Description of source:Sense strand ID:
  modified_base 1: mod_base = OTHER; note = 2'O-methyl-cytidine
  modified_base 2: mod_base = OTHER; note = 2'O-methyl-adenosine
  modified_base 3: mod_base = OTHER; note = 2'O-methyl-adenosine
  modified_base 4: mod_base = OTHER; note = 2'O-methyl-cytidine
  modified_base 5: mod_base = OTHER; note = 2'O-methyl-uridine
  modified_base 6: mod_base = OTHER; note = 2'O-methyl-guanosine
  modified_base 7: mod_base = OTHER; note = 2' Fluoro-cytidine
  modified_base 8: mod_base = OTHER; note = 2'O-methyl-adenosine
  modified_base 9: mod_base = OTHER; note = 2' Fluoro-uridine
  modified_base 10: mod_base = OTHER; note = 2' Fluoro-cytidine
  modified_base 11: mod_base = OTHER; note = 2' Fluoro-uridine
  modified_base 12: mod_base = OTHER; note = 2'Fluoro-adenosine
  modified_base 13: mod_base = OTHER; note = 2'O-methyl-cytidine
  modified_base 14: mod_base = OTHER; note = 2'O-methyl-uridine
  modified_base 15: mod_base = OTHER; note = 2'O-methyl-uridine
  modified_base 16: mod_base = OTHER; note = 2'O-methyl-cytidine
  modified_base 17: mod_base = OTHER; note = 2'O-methyl-adenosine
  modified_base 18: mod_base = OTHER; note = 2'O-methyl-adenosine
  modified_base 19: mod_base = OTHER; note = 2'O-methyl-adenosine
  modified_base 20: mod_base = OTHER; note = 2'O-methyl-guanosine
  modified_base 21: mod_base = OTHER; note = 2'O-methyl-guanosine
  modified_base 1..2: mod_base = OTHER; note = phosphorothioate linkage
  modified_base 2..3: mod_base = OTHER; note = phosphorothioate linkage
  source 1..21: mol_type = other RNA
caactgcatctacttcaaagg

SEQ ID NO: 333 - RNA, 21 nt, synthetic construct
  misc_feature 1..21: note = Description of origin: HCII siRNA sense strands
  misc_feature 1..21: note = Description of source:Sense strand ID:
  modified_base 1: mod_base = OTHER; note = 2'O-methyl-guanosine
  modified_base 2: mod_base = OTHER; note = 2'O-methyl-adenosine
  modified_base 3: mod_base = OTHER; note = 2'O-methyl-guanosine
  modified_base 4: mod_base = OTHER; note = 2'O-methyl-cytidine
  modified_base 5: mod_base = OTHER; note = 2'O-methyl-cytidine
  modified_base 6: mod_base = OTHER; note = 2'O-methyl-guanosine
  modified_base 7: mod_base = OTHER; note = 2' Fluoro-guanosine
  modified_base 8: mod_base = OTHER; note = 2'O-methyl-adenosine
  modified_base 9: mod_base = OTHER; note = 2' Fluoro-uridine
  modified_base 10: mod_base = OTHER; note = 2' Fluoro-cytidine
  modified_base 11: mod_base = OTHER; note = 2' Fluoro-cytidine
  modified_base 12: mod_base = OTHER; note = 2'Fluoro-adenosine
  modified_base 13: mod_base = OTHER; note = 2'O-methyl-guanosine
  modified_base 14: mod_base = OTHER; note = 2'O-methyl-cytidine
  modified_base 15: mod_base = OTHER; note = 2'O-methyl-guanosine
  modified_base 16: mod_base = OTHER; note = 2'O-methyl-uridine
  modified_base 17: mod_base = OTHER; note = 2'O-methyl-cytidine
  modified_base 18: mod_base = OTHER; note = 2'O-methyl-uridine
  modified_base 19: mod_base = OTHER; note = 2'O-methyl-uridine
  modified_base 20: mod_base = OTHER; note = 2'O-methyl-adenosine
  modified_base 21: mod_base = OTHER; note = 2'O-methyl-adenosine
  modified_base 1..2: mod_base = OTHER; note = phosphorothioate linkage
  modified_base 2..3: mod_base = OTHER; note = phosphorothioate linkage
  source 1..21: mol_type = other RNA
gagccggatccagcgtcttaa

SEQ ID NO: 334 - RNA, 21 nt, synthetic construct
  misc_feature 1..21: note = Description of origin: HCII siRNA sense strands
  misc_feature 1..21: note = Description of source:Sense strand ID:
  modified_base 1: mod_base = OTHER; note = 2'O-methyl-adenosine
  modified_base 2: mod_base = OTHER; note = 2'O-methyl-uridine
  modified_base 3: mod_base = OTHER; note = 2'O-methyl-cytidine
  modified_base 4: mod_base = OTHER; note = 2'O-methyl-cytidine
  modified_base 5: mod_base = OTHER; note = 2'O-methyl-adenosine
  modified_base 6: mod_base = OTHER; note = 2'O-methyl-guanosine
  modified_base 7: mod_base = OTHER; note = 2' Fluoro-cytidine
  modified_base 8: mod_base = OTHER; note = 2'O-methyl-guanosine
  modified_base 9: mod_base = OTHER; note = 2' Fluoro-uridine
  modified_base 10: mod_base = OTHER; note = 2' Fluoro-cytidine
  modified_base 11: mod_base = OTHER; note = 2' Fluoro-uridine
  modified_base 12: mod_base = OTHER; note = 2' Fluoro-uridine
  modified_base 13: mod_base = OTHER; note = 2'O-methyl-adenosine
  modified_base 14: mod_base = OTHER; note = 2'O-methyl-adenosine
  modified_base 15: mod_base = OTHER; note = 2'O-methyl-cytidine
  modified_base 16: mod_base = OTHER; note = 2'O-methyl-adenosine
  modified_base 17: mod_base = OTHER; note = 2'O-methyl-uridine
  modified_base 18: mod_base = OTHER; note = 2'O-methyl-cytidine
  modified_base 19: mod_base = OTHER; note = 2'O-methyl-cytidine
  modified_base 20: mod_base = OTHER; note = 2'O-methyl-uridine
  modified_base 21: mod_base = OTHER; note = 2'O-methyl-cytidine
  modified_base 1..2: mod_base = OTHER; note = phosphorothioate linkage
  modified_base 2..3: mod_base = OTHER; note = phosphorothioate linkage
  source 1..21: mol_type = other RNA
atccagcgtcttaacatcctc

SEQ ID NO: 335 - RNA, 21 nt, synthetic construct
  misc_feature 1..21: note = Description of origin: HCII siRNA sense strands
  misc_feature 1..21: note = Description of source:Sense strand ID:
  modified_base 1: mod_base = OTHER; note = 2'O-methyl-cytidine
  modified_base 2: mod_base = OTHER; note = 2'O-methyl-adenosine
  modified_base 3: mod_base = OTHER; note = 2'O-methyl-adenosine
  modified_base 4: mod_base = OTHER; note = 2'O-methyl-adenosine
  modified_base 5: mod_base = OTHER; note = 2'O-methyl-adenosine
  modified_base 6: mod_base = OTHER; note = 2'O-methyl-adenosine
  modified_base 7: mod_base = OTHER; note = 2'Fluoro-adenosine
  modified_base 8: mod_base = OTHER; note = 2'O-methyl-guanosine
  modified_base 9: mod_base = OTHER; note = 2' Fluoro-cytidine
  modified_base 10: mod_base = OTHER; note = 2'Fluoro-adenosine
  modified_base 11: mod_base = OTHER; note = 2' Fluoro-uridine
  modified_base 12: mod_base = OTHER; note = 2' Fluoro-guanosine
  modified_base 13: mod_base = OTHER; note = 2'O-methyl-adenosine
  modified_base 14: mod_base = OTHER; note = 2'O-methyl-cytidine
  modified_base 15: mod_base = OTHER; note = 2'O-methyl-adenosine
  modified_base 16: mod_base = OTHER; note = 2'O-methyl-adenosine
  modified_base 17: mod_base = OTHER; note = 2'O-methyl-adenosine
  modified_base 18: mod_base = OTHER; note = 2'O-methyl-cytidine
  modified_base 19: mod_base = OTHER; note = 2'O-methyl-adenosine
  modified_base 20: mod_base = OTHER; note = 2'O-methyl-guanosine
  modified_base 21: mod_base = OTHER; note = 2'O-methyl-adenosine
  modified_base 1..2: mod_base = OTHER; note = phosphorothioate linkage
  modified_base 2..3: mod_base = OTHER; note = phosphorothioate linkage
  source 1..21: mol_type = other RNA
caaaaaagcatgacaaacaga

SEQ ID NO: 336 - RNA, 21 nt, synthetic construct
  misc_feature 1..21: note = Description of origin: HCII siRNA sense strands
  misc_feature 1..21: note = Description of source:Sense strand ID:
  modified_base 1: mod_base = OTHER; note = 2'O-methyl-cytidine
  modified_base 2: mod_base = OTHER; note = 2'O-methyl-adenosine
  modified_base 3: mod_base = OTHER; note = 2'O-methyl-guanosine
  modified_base 4: mod_base = OTHER; note = 2'O-methyl-guanosine
  modified_base 5: mod_base = OTHER; note = 2'O-methyl-adenosine
  modified_base 6: mod_base = OTHER; note = 2'O-methyl-guanosine
  modified_base 7: mod_base = OTHER; note = 2' Fluoro-guanosine
  modified_base 8: mod_base = OTHER; note = 2'O-methyl-adenosine
  modified_base 9: mod_base = OTHER; note = 2'Fluoro-adenosine
  modified_base 10: mod_base = OTHER; note = 2' Fluoro-uridine
  modified_base 11: mod_base = OTHER; note = 2' Fluoro-uridine
  modified_base 12: mod_base = OTHER; note = 2' Fluoro-uridine
  modified_base 13: mod_base = OTHER; note = 2'O-methyl-uridine
  modified_base 14: mod_base = OTHER; note = 2'O-methyl-guanosine
  modified_base 15: mod_base = OTHER; note = 2'O-methyl-guanosine
  modified_base 16: mod_base = OTHER; note = 2'O-methyl-guanosine
  modified_base 17: mod_base = OTHER; note = 2'O-methyl-uridine
  modified_base 18: mod_base = OTHER; note = 2'O-methyl-adenosine
  modified_base 19: mod_base = OTHER; note = 2'O-methyl-cytidine
  modified_base 20: mod_base = OTHER; note = 2'O-methyl-adenosine
  modified_base 21: mod_base = OTHER; note = 2'O-methyl-cytidine
  modified_base 1..2: mod_base = OTHER; note = phosphorothioate linkage
  modified_base 2..3: mod_base = OTHER; note = phosphorothioate linkage
  source 1..21: mol_type = other RNA
caggaggaattttgggtacac

SEQ ID NO: 337 - RNA, 21 nt, synthetic construct
  misc_feature 1..21: note = Description of origin: HCII siRNA sense strands
  misc_feature 1..21: note = Description of source:Sense strand ID:
  modified_base 1: mod_base = OTHER; note = 2'O-methyl-cytidine
  modified_base 2: mod_base = OTHER; note = 2'O-methyl-adenosine
  modified_base 3: mod_base = OTHER; note = 2'O-methyl-adenosine
  modified_base 4: mod_base = OTHER; note = 2'O-methyl-cytidine
  modified_base 5: mod_base = OTHER; note = 2'O-methyl-cytidine
  modified_base 6: mod_base = OTHER; note = 2'O-methyl-adenosine
  modified_base 7: mod_base = OTHER; note = 2' Fluoro-cytidine
  modified_base 8: mod_base = OTHER; note = 2'O-methyl-adenosine
  modified_base 9: mod_base = OTHER; note = 2'Fluoro-adenosine
  modified_base 10: mod_base = OTHER; note = 2' Fluoro-cytidine
  modified_base 11: mod_base = OTHER; note = 2' Fluoro-uridine
  modified_base 12: mod_base = OTHER; note = 2' Fluoro-uridine
  modified_base 13: mod_base = OTHER; note = 2'O-methyl-cytidine
  modified_base 14: mod_base = OTHER; note = 2'O-methyl-cytidine
  modified_base 15: mod_base = OTHER; note = 2'O-methyl-guanosine
  modified_base 16: mod_base = OTHER; note = 2'O-methyl-guanosine
  modified_base 17: mod_base = OTHER; note = 2'O-methyl-cytidine
  modified_base 18: mod_base = OTHER; note = 2'O-methyl-uridine
  modified_base 19: mod_base = OTHER; note = 2'O-methyl-guanosine
  modified_base 20: mod_base = OTHER; note = 2'O-methyl-adenosine
  modified_base 21: mod_base = OTHER; note = 2'O-methyl-adenosine
  modified_base 1..2: mod_base = OTHER; note = phosphorothioate linkage
  modified_base 2..3: mod_base = OTHER; note = phosphorothioate linkage
  source 1..21: mol_type = other RNA
caaccacaacttccggctgaa

SEQ ID NO: 338 - RNA, 21 nt, synthetic construct
  misc_feature 1..21: note = Description of origin: HCII siRNA sense strands
  misc_feature 1..21: note = Description of source:Sense strand ID:
  modified_base 1: mod_base = OTHER; note = 2'O-methyl-guanosine
  modified_base 2: mod_base = OTHER; note = 2'O-methyl-guanosine
  modified_base 3: mod_base = OTHER; note = 2'O-methyl-cytidine
  modified_base 4: mod_base = OTHER; note = 2'O-methyl-adenosine
  modified_base 5: mod_base = OTHER; note = 2'O-methyl-adenosine
  modified_base 6: mod_base = OTHER; note = 2'O-methyl-adenosine
  modified_base 7: mod_base = OTHER; note = 2'Fluoro-adenosine
  modified_base 8: mod_base = OTHER; note = 2'O-methyl-adenosine
  modified_base 9: mod_base = OTHER; note = 2'Fluoro-adenosine
  modified_base 10: mod_base = OTHER; note = 2' Fluoro-guanosine
  modified_base 11: mod_base = OTHER; note = 2' Fluoro-cytidine
  modified_base 12: mod_base = OTHER; note = 2'Fluoro-adenosine
  modified_base 13: mod_base = OTHER; note = 2'O-methyl-uridine
  modified_base 14: mod_base = OTHER; note = 2'O-methyl-guanosine
  modified_base 15: mod_base = OTHER; note = 2'O-methyl-adenosine
  modified_base 16: mod_base = OTHER; note = 2'O-methyl-cytidine
  modified_base 17: mod_base = OTHER; note = 2'O-methyl-adenosine
  modified_base 18: mod_base = OTHER; note = 2'O-methyl-adenosine
  modified_base 19: mod_base = OTHER; note = 2'O-methyl-adenosine
  modified_base 20: mod_base = OTHER; note = 2'O-methyl-cytidine
  modified_base 21: mod_base = OTHER; note = 2'O-methyl-adenosine
  modified_base 1..2: mod_base = OTHER; note = phosphorothioate linkage
  modified_base 2..3: mod_base = OTHER; note = phosphorothioate linkage
  source 1..21: mol_type = other RNA
ggcaaaaaagcatgacaaaca

SEQ ID NO: 339 - RNA, 21 nt, synthetic construct
  misc_feature 1..21: note = Description of origin: HCII siRNA sense strands
  misc_feature 1..21: note = Description of source:Sense strand ID:
  modified_base 1: mod_base = OTHER; note = 2'O-methyl-guanosine
  modified_base 2: mod_base = OTHER; note = 2'O-methyl-adenosine
  modified_base 3: mod_base = OTHER; note = 2'O-methyl-adenosine
  modified_base 4: mod_base = OTHER; note = 2'O-methyl-uridine
  modified_base 5: mod_base = OTHER; note = 2'O-methyl-adenosine
  modified_base 6: mod_base = OTHER; note = 2'O-methyl-adenosine
  modified_base 7: mod_base = OTHER; note = 2'Fluoro-adenosine
  modified_base 8: mod_base = OTHER; note = 2'O-methyl-uridine
  modified_base 9: mod_base = OTHER; note = 2' Fluoro-uridine
  modified_base 10: mod_base = OTHER; note = 2' Fluoro-cytidine
  modified_base 11: mod_base = OTHER; note = 2' Fluoro-cytidine
  modified_base 12: mod_base = OTHER; note = 2' Fluoro-cytidine
  modified_base 13: mod_base = OTHER; note = 2'O-methyl-adenosine
  modified_base 14: mod_base = OTHER; note = 2'O-methyl-guanosine
  modified_base 15: mod_base = OTHER; note = 2'O-methyl-uridine
  modified_base 16: mod_base = OTHER; note = 2'O-methyl-guanosine
  modified_base 17: mod_base = OTHER; note = 2'O-methyl-guanosine
  modified_base 18: mod_base = OTHER; note = 2'O-methyl-adenosine
  modified_base 19: mod_base = OTHER; note = 2'O-methyl-adenosine
  modified_base 20: mod_base = OTHER; note = 2'O-methyl-adenosine
  modified_base 21: mod_base = OTHER; note = 2'O-methyl-uridine
  modified_base 1..2: mod_base = OTHER; note = phosphorothioate linkage
  modified_base 2..3: mod_base = OTHER; note = phosphorothioate linkage
  source 1..21: mol_type = other RNA
gaataaattcccagtggaaat

SEQ ID NO: 340 - RNA, 21 nt, synthetic construct
  misc_feature 1..21: note = Description of origin: HCII siRNA sense strands
  misc_feature 1..21: note = Description of source:Sense strand ID:
  modified_base 1: mod_base = OTHER; note = 2'O-methyl-guanosine
  modified_base 2: mod_base = OTHER; note = 2'O-methyl-guanosine
  modified_base 3: mod_base = OTHER; note = 2'O-methyl-guanosine
  modified_base 4: mod_base = OTHER; note = 2'O-methyl-cytidine
  modified_base 5: mod_base = OTHER; note = 2'O-methyl-adenosine
  modified_base 6: mod_base = OTHER; note = 2'O-methyl-uridine
  modified_base 7: mod_base = OTHER; note = 2' Fluoro-cytidine
  modified_base 8: mod_base = OTHER; note = 2'O-methyl-adenosine
  modified_base 9: mod_base = OTHER; note = 2' Fluoro-guanosine
  modified_base 10: mod_base = OTHER; note = 2' Fluoro-cytidine
  modified_base 11: mod_base = OTHER; note = 2'Fluoro-adenosine
  modified_base 12: mod_base = OTHER; note = 2' Fluoro-uridine
  modified_base 13: mod_base = OTHER; note = 2'O-methyl-guanosine
  modified_base 14: mod_base = OTHER; note = 2'O-methyl-cytidine
  modified_base 15: mod_base = OTHER; note = 2'O-methyl-uridine
  modified_base 16: mod_base = OTHER; note = 2'O-methyl-adenosine
  modified_base 17: mod_base = OTHER; note = 2'O-methyl-adenosine
  modified_base 18: mod_base = OTHER; note = 2'O-methyl-uridine
  modified_base 19: mod_base = OTHER; note = 2'O-methyl-uridine
  modified_base 20: mod_base = OTHER; note = 2'O-methyl-guanosine
  modified_base 21: mod_base = OTHER; note = 2'O-methyl-uridine
  modified_base 1..2: mod_base = OTHER; note = phosphorothioate linkage
  modified_base 2..3: mod_base = OTHER; note = phosphorothioate linkage
  source 1..21: mol_type = other RNA
gggcatcagcatgctaattgt

SEQ ID NO: 341 - RNA, 21 nt, synthetic construct
  misc_feature 1..21: note = Description of origin: HCII siRNA sense strands
  misc_feature 1..21: note = Description of source:Sense strand ID:
  modified_base 1: mod_base = OTHER; note = 2'O-methyl-adenosine
  modified_base 2: mod_base = OTHER; note = 2'O-methyl-adenosine
  modified_base 3: mod_base = OTHER; note = 2'O-methyl-adenosine
  modified_base 4: mod_base = OTHER; note = 2'O-methyl-adenosine
  modified_base 5: mod_base = OTHER; note = 2'O-methyl-adenosine
  modified_base 6: mod_base = OTHER; note = 2'O-methyl-guanosine
  modified_base 7: mod_base = OTHER; note = 2' Fluoro-cytidine
  modified_base 8: mod_base = OTHER; note = 2'O-methyl-adenosine
  modified_base 9: mod_base = OTHER; note = 2' Fluoro-uridine
  modified_base 10: mod_base = OTHER; note = 2' Fluoro-guanosine
  modified_base 11: mod_base = OTHER; note = 2'Fluoro-adenosine
  modified_base 12: mod_base = OTHER; note = 2' Fluoro-cytidine
  modified_base 13: mod_base = OTHER; note = 2'O-methyl-adenosine
  modified_base 14: mod_base = OTHER; note = 2'O-methyl-adenosine
  modified_base 15: mod_base = OTHER; note = 2'O-methyl-adenosine
  modified_base 16: mod_base = OTHER; note = 2'O-methyl-cytidine
  modified_base 17: mod_base = OTHER; note = 2'O-methyl-adenosine
  modified_base 18: mod_base = OTHER; note = 2'O-methyl-guanosine
  modified_base 19: mod_base = OTHER; note = 2'O-methyl-adenosine
  modified_base 20: mod_base = OTHER; note = 2'O-methyl-adenosine
  modified_base 21: mod_base = OTHER; note = 2'O-methyl-cytidine
  modified_base 1..2: mod_base = OTHER; note = phosphorothioate linkage
  modified_base 2..3: mod_base = OTHER; note = phosphorothioate linkage
  source 1..21: mol_type = other RNA
aaaaagcatgacaaacagaac

SEQ ID NO: 342 - RNA, 21 nt, synthetic construct
  misc_feature 1..21: note = Description of origin: HCII siRNA sense strands
  misc_feature 1..21: note = Description of source:Sense strand ID:
  modified_base 1: mod_base = OTHER; note = 2'O-methyl-guanosine
  modified_base 2: mod_base = OTHER; note = 2'O-methyl-adenosine
  modified_base 3: mod_base = OTHER; note = 2'O-methyl-guanosine
  modified_base 4: mod_base = OTHER; note = 2'O-methyl-uridine
  modified_base 5: mod_base = OTHER; note = 2'O-methyl-adenosine
  modified_base 6: mod_base = OTHER; note = 2'O-methyl-uridine
  modified_base 7: mod_base = OTHER; note = 2' Fluoro-uridine
  modified_base 8: mod_base = OTHER; note = 2'O-methyl-adenosine
  modified_base 9: mod_base = OTHER; note = 2' Fluoro-cytidine
  modified_base 10: mod_base = OTHER; note = 2' Fluoro-uridine
  modified_base 11: mod_base = OTHER; note = 2' Fluoro-uridine
  modified_base 12: mod_base = OTHER; note = 2' Fluoro-uridine
  modified_base 13: mod_base = OTHER; note = 2'O-methyl-guanosine
  modified_base 14: mod_base = OTHER; note = 2'O-methyl-cytidine
  modified_base 15: mod_base = OTHER; note = 2'O-methyl-uridine
  modified_base 16: mod_base = OTHER; note = 2'O-methyl-guanosine
  modified_base 17: mod_base = OTHER; note = 2'O-methyl-adenosine
  modified_base 18: mod_base = OTHER; note = 2'O-methyl-guanosine
  modified_base 19: mod_base = OTHER; note = 2'O-methyl-guanosine
  modified_base 20: mod_base = OTHER; note = 2'O-methyl-cytidine
  modified_base 21: mod_base = OTHER; note = 2'O-methyl-cytidine
  modified_base 1..2: mod_base = OTHER; note = phosphorothioate linkage
  modified_base 2..3: mod_base = OTHER; note = phosphorothioate linkage
  source 1..21: mol_type = other RNA
gagtattactttgctgaggcc

SEQ ID NO: 343 - RNA, 21 nt, synthetic construct
  misc_feature 1..21: note = Description of origin: HCII siRNA sense strands
  misc_feature 1..21: note = Description of source:Sense strand ID:
  modified_base 1: mod_base = OTHER; note = 2'O-methyl-uridine
  modified_base 2: mod_base = OTHER; note = 2'O-methyl-guanosine
  modified_base 3: mod_base = OTHER; note = 2'O-methyl-adenosine
  modified_base 4: mod_base = OTHER; note = 2'O-methyl-adenosine
  modified_base 5: mod_base = OTHER; note = 2'O-methyl-uridine
  modified_base 6: mod_base = OTHER; note = 2'O-methyl-adenosine
  modified_base 7: mod_base = OTHER; note = 2'Fluoro-adenosine
  modified_base 8: mod_base = OTHER; note = 2'O-methyl-adenosine
  modified_base 9: mod_base = OTHER; note = 2' Fluoro-uridine
  modified_base 10: mod_base = OTHER; note = 2' Fluoro-uridine
  modified_base 11: mod_base = OTHER; note = 2' Fluoro-cytidine
  modified_base 12: mod_base = OTHER; note = 2' Fluoro-cytidine
  modified_base 13: mod_base = OTHER; note = 2'O-methyl-cytidine
  modified_base 14: mod_base = OTHER; note = 2'O-methyl-adenosine
  modified_base 15: mod_base = OTHER; note = 2'O-methyl-guanosine
  modified_base 16: mod_base = OTHER; note = 2'O-methyl-uridine
  modified_base 17: mod_base = OTHER; note = 2'O-methyl-guanosine
  modified_base 18: mod_base = OTHER; note = 2'O-methyl-guanosine
  modified_base 19: mod_base = OTHER; note = 2'O-methyl-adenosine
  modified_base 20: mod_base = OTHER; note = 2'O-methyl-adenosine
  modified_base 21: mod_base = OTHER; note = 2'O-methyl-adenosine
  modified_base 1..2: mod_base = OTHER; note = phosphorothioate linkage
  modified_base 2..3: mod_base = OTHER; note = phosphorothioate linkage
  source 1..21: mol_type = other RNA
tgaataaattcccagtggaaa

SEQ ID NO: 344 - RNA, 21 nt, synthetic construct
  misc_feature 1..21: note = Description of origin: HCII siRNA sense strands
  misc_feature 1..21: note = Description of source:Sense strand ID:
  modified_base 1: mod_base = OTHER; note = 2'O-methyl-cytidine
  modified_base 2: mod_base = OTHER; note = 2'O-methyl-uridine
  modified_base 3: mod_base = OTHER; note = 2'O-methyl-guanosine
  modified_base 4: mod_base = OTHER; note = 2'O-methyl-cytidine
  modified_base 5: mod_base = OTHER; note = 2'O-methyl-adenosine
  modified_base 6: mod_base = OTHER; note = 2'O-methyl-uridine
  modified_base 7: mod_base = OTHER; note = 2' Fluoro-cytidine
  modified_base 8: mod_base = OTHER; note = 2'O-methyl-uridine
  modified_base 9: mod_base = OTHER; note = 2'Fluoro-adenosine
  modified_base 10: mod_base = OTHER; note = 2' Fluoro-cytidine
  modified_base 11: mod_base = OTHER; note = 2' Fluoro-uridine
  modified_base 12: mod_base = OTHER; note = 2' Fluoro-uridine
  modified_base 13: mod_base = OTHER; note = 2'O-methyl-cytidine
  modified_base 14: mod_base = OTHER; note = 2'O-methyl-adenosine
  modified_base 15: mod_base = OTHER; note = 2'O-methyl-adenosine
  modified_base 16: mod_base = OTHER; note = 2'O-methyl-adenosine
  modified_base 17: mod_base = OTHER; note = 2'O-methyl-guanosine
  modified_base 18: mod_base = OTHER; note = 2'O-methyl-guanosine
  modified_base 19: mod_base = OTHER; note = 2'O-methyl-adenosine
  modified_base 20: mod_base = OTHER; note = 2'O-methyl-uridine
  modified_base 21: mod_base = OTHER; note = 2'O-methyl-cytidine
  modified_base 1..2: mod_base = OTHER; note = phosphorothioate linkage
  modified_base 2..3: mod_base = OTHER; note = phosphorothioate linkage
  source 1..21: mol_type = other RNA
ctgcatctacttcaaaggatc

SEQ ID NO: 345 - RNA, 21 nt, synthetic construct
  misc_feature 1..21: note = Description of origin: HCII siRNA sense strands
  misc_feature 1..21: note = Description of source:Sense strand ID:
  modified_base 1: mod_base = OTHER; note = 2'O-methyl-adenosine
  modified_base 2: mod_base = OTHER; note = 2'O-methyl-cytidine
  modified_base 3: mod_base = OTHER; note = 2'O-methyl-uridine
  modified_base 4: mod_base = OTHER; note = 2'O-methyl-guanosine
  modified_base 5: mod_base = OTHER; note = 2'O-methyl-cytidine
  modified_base 6: mod_base = OTHER; note = 2'O-methyl-adenosine
  modified_base 7: mod_base = OTHER; note = 2' Fluoro-uridine
  modified_base 8: mod_base = OTHER; note = 2'O-methyl-cytidine
  modified_base 9: mod_base = OTHER; note = 2' Fluoro-uridine
  modified_base 10: mod_base = OTHER; note = 2'Fluoro-adenosine
  modified_base 11: mod_base = OTHER; note = 2' Fluoro-cytidine
  modified_base 12: mod_base = OTHER; note = 2' Fluoro-uridine
  modified_base 13: mod_base = OTHER; note = 2'O-methyl-uridine
  modified_base 14: mod_base = OTHER; note = 2'O-methyl-cytidine
  modified_base 15: mod_base = OTHER; note = 2'O-methyl-adenosine
  modified_base 16: mod_base = OTHER; note = 2'O-methyl-adenosine
  modified_base 17: mod_base = OTHER; note = 2'O-methyl-adenosine
  modified_base 18: mod_base = OTHER; note = 2'O-methyl-guanosine
  modified_base 19: mod_base = OTHER; note = 2'O-methyl-guanosine
  modified_base 20: mod_base = OTHER; note = 2'O-methyl-adenosine
  modified_base 21: mod_base = OTHER; note = 2'O-methyl-uridine
  modified_base 1..2: mod_base = OTHER; note = phosphorothioate linkage
  modified_base 2..3: mod_base = OTHER; note = phosphorothioate linkage
  source 1..21: mol_type = other RNA
actgcatctacttcaaaggat

SEQ ID NO: 346 - RNA, 21 nt, synthetic construct
  misc_feature 1..21: note = Description of origin: HCII siRNA sense strands
  misc_feature 1..21: note = Description of source:Sense strand ID:
  modified_base 1: mod_base = OTHER; note = 2'O-methyl-guanosine
  modified_base 2: mod_base = OTHER; note = 2'O-methyl-guanosine
  modified_base 3: mod_base = OTHER; note = 2'O-methyl-guanosine
  modified_base 4: mod_base = OTHER; note = 2'O-methyl-adenosine
  modified_base 5: mod_base = OTHER; note = 2'O-methyl-guanosine
  modified_base 6: mod_base = OTHER; note = 2'O-methyl-adenosine
  modified_base 7: mod_base = OTHER; note = 2' Fluoro-guanosine
  modified_base 8: mod_base = OTHER; note = 2'O-methyl-adenosine
  modified_base 9: mod_base = OTHER; note = 2' Fluoro-cytidine
  modified_base 10: mod_base = OTHER; note = 2' Fluoro-cytidine
  modified_base 11: mod_base = OTHER; note = 2' Fluoro-cytidine
  modified_base 12: mod_base = OTHER; note = 2'Fluoro-adenosine
  modified_base 13: mod_base = OTHER; note = 2'O-methyl-uridine
  modified_base 14: mod_base = OTHER; note = 2'O-methyl-guanosine
  modified_base 15: mod_base = OTHER; note = 2'O-methyl-adenosine
  modified_base 16: mod_base = OTHER; note = 2'O-methyl-adenosine
  modified_base 17: mod_base = OTHER; note = 2'O-methyl-cytidine
  modified_base 18: mod_base = OTHER; note = 2'O-methyl-adenosine
  modified_base 19: mod_base = OTHER; note = 2'O-methyl-adenosine
  modified_base 20: mod_base = OTHER; note = 2'O-methyl-guanosine
  modified_base 21: mod_base = OTHER; note = 2'O-methyl-uridine
  modified_base 1..2: mod_base = OTHER; note = phosphorothioate linkage
  modified_base 2..3: mod_base = OTHER; note = phosphorothioate linkage
  source 1..21: mol_type = other RNA
gggagagacccatgaacaagt

SEQ ID NO: 347 - RNA, 21 nt, synthetic construct
  misc_feature 1..21: note = Description of origin: HCII siRNA sense strands
  misc_feature 1..21: note = Description of source:Sense strand ID:
  modified_base 1: mod_base = OTHER; note = 2'O-methyl-guanosine
  modified_base 2: mod_base = OTHER; note = 2'O-methyl-guanosine
  modified_base 3: mod_base = OTHER; note = 2'O-methyl-uridine
  modified_base 4: mod_base = OTHER; note = 2'O-methyl-guanosine
  modified_base 5: mod_base = OTHER; note = 2'O-methyl-adenosine
  modified_base 6: mod_base = OTHER; note = 2'O-methyl-adenosine
  modified_base 7: mod_base = OTHER; note = 2' Fluoro-uridine
  modified_base 8: mod_base = OTHER; note = 2'O-methyl-adenosine
  modified_base 9: mod_base = OTHER; note = 2'Fluoro-adenosine
  modified_base 10: mod_base = OTHER; note = 2'Fluoro-adenosine
  modified_base 11: mod_base = OTHER; note = 2' Fluoro-uridine
  modified_base 12: mod_base = OTHER; note = 2' Fluoro-uridine
  modified_base 13: mod_base = OTHER; note = 2'O-methyl-cytidine
  modified_base 14: mod_base = OTHER; note = 2'O-methyl-cytidine
  modified_base 15: mod_base = OTHER; note = 2'O-methyl-cytidine
  modified_base 16: mod_base = OTHER; note = 2'O-methyl-adenosine
  modified_base 17: mod_base = OTHER; note = 2'O-methyl-guanosine
  modified_base 18: mod_base = OTHER; note = 2'O-methyl-uridine
  modified_base 19: mod_base = OTHER; note = 2'O-methyl-guanosine
  modified_base 20: mod_base = OTHER; note = 2'O-methyl-guanosine
  modified_base 21: mod_base = OTHER; note = 2'O-methyl-adenosine
  modified_base 1..2: mod_base = OTHER; note = phosphorothioate linkage
  modified_base 2..3: mod_base = OTHER; note = phosphorothioate linkage
  source 1..21: mol_type = other RNA
ggtgaataaattcccagtgga

SEQ ID NO: 348 - RNA, 21 nt, synthetic construct
  misc_feature 1..21: note = Description of origin: HCII siRNA sense strands
  misc_feature 1..21: note = Description of source:Sense strand ID:
  modified_base 1: mod_base = OTHER; note = 2'O-methyl-uridine
  modified_base 2: mod_base = OTHER; note = 2'O-methyl-cytidine
  modified_base 3: mod_base = OTHER; note = 2'O-methyl-adenosine
  modified_base 4: mod_base = OTHER; note = 2'O-methyl-guanosine
  modified_base 5: mod_base = OTHER; note = 2'O-methyl-guanosine
  modified_base 6: mod_base = OTHER; note = 2'O-methyl-adenosine
  modified_base 7: mod_base = OTHER; note = 2' Fluoro-guanosine
  modified_base 8: mod_base = OTHER; note = 2'O-methyl-guanosine
  modified_base 9: mod_base = OTHER; note = 2'Fluoro-adenosine
  modified_base 10: mod_base = OTHER; note = 2'Fluoro-adenosine
  modified_base 11: mod_base = OTHER; note = 2' Fluoro-uridine
  modified_base 12: mod_base = OTHER; note = 2' Fluoro-uridine
  modified_base 13: mod_base = OTHER; note = 2'O-methyl-uridine
  modified_base 14: mod_base = OTHER; note = 2'O-methyl-uridine
  modified_base 15: mod_base = OTHER; note = 2'O-methyl-guanosine
  modified_base 16: mod_base = OTHER; note = 2'O-methyl-guanosine
  modified_base 17: mod_base = OTHER; note = 2'O-methyl-guanosine
  modified_base 18: mod_base = OTHER; note = 2'O-methyl-uridine
  modified_base 19: mod_base = OTHER; note = 2'O-methyl-adenosine
  modified_base 20: mod_base = OTHER; note = 2'O-methyl-cytidine
  modified_base 21: mod_base = OTHER; note = 2'O-methyl-adenosine
  modified_base 1..2: mod_base = OTHER; note = phosphorothioate linkage
  modified_base 2..3: mod_base = OTHER; note = phosphorothioate linkage
  source 1..21: mol_type = other RNA
tcaggaggaattttgggtaca

SEQ ID NO: 349 - RNA, 21 nt, synthetic construct
  misc_feature 1..21: note = Description of origin: HCII siRNA sense strands
  misc_feature 1..21: note = Description of source:Sense strand ID:
  modified_base 1: mod_base = OTHER; note = 2'O-methyl-guanosine
  modified_base 2: mod_base = OTHER; note = 2'O-methyl-cytidine
  modified_base 3: mod_base = OTHER; note = 2'O-methyl-uridine
  modified_base 4: mod_base = OTHER; note = 2'O-methyl-guanosine
  modified_base 5: mod_base = OTHER; note = 2'O-methyl-cytidine
  modified_base 6: mod_base = OTHER; note = 2'O-methyl-cytidine
  modified_base 7: mod_base = OTHER; note = 2' Fluoro-uridine
  modified_base 8: mod_base = OTHER; note = 2'O-methyl-guanosine
  modified_base 9: mod_base = OTHER; note = 2' Fluoro-cytidine
  modified_base 10: mod_base = OTHER; note = 2' Fluoro-uridine
  modified_base 11: mod_base = OTHER; note = 2' Fluoro-cytidine
  modified_base 12: mod_base = OTHER; note = 2' Fluoro-uridine
  modified_base 13: mod_base = OTHER; note = 2'O-methyl-uridine
  modified_base 14: mod_base = OTHER; note = 2'O-methyl-cytidine
  modified_base 15: mod_base = OTHER; note = 2'O-methyl-adenosine
  modified_base 16: mod_base = OTHER; note = 2'O-methyl-uridine
  modified_base 17: mod_base = OTHER; note = 2'O-methyl-guanosine
  modified_base 18: mod_base = OTHER; note = 2'O-methyl-guanosine
  modified_base 19: mod_base = OTHER; note = 2'O-methyl-guanosine
  modified_base 20: mod_base = OTHER; note = 2'O-methyl-adenosine
  modified_base 21: mod_base = OTHER; note = 2'O-methyl-adenosine
  modified_base 1..2: mod_base = OTHER; note = phosphorothioate linkage
  modified_base 2..3: mod_base = OTHER; note = phosphorothioate linkage
  source 1..21: mol_type = other RNA
gctgcctgctcttcatgggaa

SEQ ID NO: 350 - RNA, 21 nt, synthetic construct
  misc_feature 1..21: note = Description of origin: HCII siRNA sense strands
  misc_feature 1..21: note = Description of source:Sense strand ID:
  modified_base 1: mod_base = OTHER; note = 2'O-methyl-cytidine
  modified_base 2: mod_base = OTHER; note = 2'O-methyl-adenosine
  modified_base 3: mod_base = OTHER; note = 2'O-methyl-cytidine
  modified_base 4: mod_base = OTHER; note = 2'O-methyl-cytidine
  modified_base 5: mod_base = OTHER; note = 2'O-methyl-adenosine
  modified_base 6: mod_base = OTHER; note = 2'O-methyl-adenosine
  modified_base 7: mod_base = OTHER; note = 2' Fluoro-guanosine
  modified_base 8: mod_base = OTHER; note = 2'O-methyl-guanosine
  modified_base 9: mod_base = OTHER; note = 2' Fluoro-guanosine
  modified_base 10: mod_base = OTHER; note = 2' Fluoro-cytidine
  modified_base 11: mod_base = OTHER; note = 2' Fluoro-cytidine
  modified_base 12: mod_base = OTHER; note = 2' Fluoro-uridine
  modified_base 13: mod_base = OTHER; note = 2'O-methyl-cytidine
  modified_base 14: mod_base = OTHER; note = 2'O-methyl-adenosine
  modified_base 15: mod_base = OTHER; note = 2'O-methyl-uridine
  modified_base 16: mod_base = OTHER; note = 2'O-methyl-adenosine
  modified_base 17: mod_base = OTHER; note = 2'O-methyl-adenosine
  modified_base 18: mod_base = OTHER; note = 2'O-methyl-adenosine
  modified_base 19: mod_base = OTHER; note = 2'O-methyl-adenosine
  modified_base 20: mod_base = OTHER; note = 2'O-methyl-guanosine
  modified_base 21: mod_base = OTHER; note = 2'O-methyl-adenosine
  modified_base 1..2: mod_base = OTHER; note = phosphorothioate linkage
  modified_base 2..3: mod_base = OTHER; note = phosphorothioate linkage
  source 1..21: mol_type = other RNA
caccaagggcctcataaaaga

SEQ ID NO: 351 - RNA, 21 nt, synthetic construct
  misc_feature 1..21: note = Description of origin: HCII siRNA sense strands
  misc_feature 1..21: note = Description of source:Sense strand ID:
  modified_base 1: mod_base = OTHER; note = 2'O-methyl-cytidine
  modified_base 2: mod_base = OTHER; note = 2'O-methyl-cytidine
  modified_base 3: mod_base = OTHER; note = 2'O-methyl-uridine
  modified_base 4: mod_base = OTHER; note = 2'O-methyl-uridine
  modified_base 5: mod_base = OTHER; note = 2'O-methyl-uridine
  modified_base 6: mod_base = OTHER; note = 2'O-methyl-adenosine
  modified_base 7: mod_base = OTHER; note = 2' Fluoro-uridine
  modified_base 8: mod_base = OTHER; note = 2'O-methyl-adenosine
  modified_base 9: mod_base = OTHER; note = 2' Fluoro-uridine
  modified_base 10: mod_base = OTHER; note = 2' Fluoro-cytidine
  modified_base 11: mod_base = OTHER; note = 2' Fluoro-cytidine
  modified_base 12: mod_base = OTHER; note = 2'Fluoro-adenosine
  modified_base 13: mod_base = OTHER; note = 2'O-methyl-guanosine
  modified_base 14: mod_base = OTHER; note = 2'O-methyl-adenosine
  modified_base 15: mod_base = OTHER; note = 2'O-methyl-adenosine
  modified_base 16: mod_base = OTHER; note = 2'O-methyl-guanosine
  modified_base 17: mod_base = OTHER; note = 2'O-methyl-cytidine
  modified_base 18: mod_base = OTHER; note = 2'O-methyl-adenosine
  modified_base 19: mod_base = OTHER; note = 2'O-methyl-guanosine
  modified_base 20: mod_base = OTHER; note = 2'O-methyl-uridine
  modified_base 21: mod_base = OTHER; note = 2'O-methyl-uridine
  modified_base 1..2: mod_base = OTHER; note = phosphorothioate linkage
  modified_base 2..3: mod_base = OTHER; note = phosphorothioate linkage
  source 1..21: mol_type = other RNA
cctttatatccagaagcagtt

SEQ ID NO: 352 - RNA, 21 nt, synthetic construct
  misc_feature 1..21: note = Description of origin: HCII siRNA sense strands
  misc_feature 1..21: note = Description of source:Sense strand ID:
  modified_base 1: mod_base = OTHER; note = 2'O-methyl-cytidine
  modified_base 2: mod_base = OTHER; note = 2'O-methyl-adenosine
  modified_base 3: mod_base = OTHER; note = 2'O-methyl-adenosine
  modified_base 4: mod_base = OTHER; note = 2'O-methyl-cytidine
  modified_base 5: mod_base = OTHER; note = 2'O-methyl-uridine
  modified_base 6: mod_base = OTHER; note = 2'O-methyl-guanosine
  modified_base 7: mod_base = OTHER; note = 2' Fluoro-cytidine
  modified_base 8: mod_base = OTHER; note = 2'O-methyl-adenosine
  modified_base 9: mod_base = OTHER; note = 2' Fluoro-uridine
  modified_base 10: mod_base = OTHER; note = 2' Fluoro-cytidine
  modified_base 11: mod_base = OTHER; note = 2' Fluoro-uridine
  modified_base 12: mod_base = OTHER; note = 2'Fluoro-adenosine
  modified_base 13: mod_base = OTHER; note = 2'O-methyl-cytidine
  modified_base 14: mod_base = OTHER; note = 2'O-methyl-uridine
  modified_base 15: mod_base = OTHER; note = 2'O-methyl-uridine
  modified_base 16: mod_base = OTHER; note = 2'O-methyl-cytidine
  modified_base 17: mod_base = OTHER; note = 2'O-methyl-adenosine
  modified_base 18: mod_base = OTHER; note = 2'O-methyl-adenosine
  modified_base 19: mod_base = OTHER; note = 2'O-methyl-adenosine
  modified_base 20: mod_base = OTHER; note = 2'O-methyl-guanosine
  modified_base 21: mod_base = OTHER; note = 2'O-methyl-guanosine
  modified_base 1..2: mod_base = OTHER; note = phosphorothioate linkage
  modified_base 2..3: mod_base = OTHER; note = phosphorothioate linkage
  source 1..21: mol_type = other RNA
caactgcatctacttcaaagg

SEQ ID NO: 353 - RNA, 21 nt, synthetic construct
  misc_feature 1..21: note = Description of origin: HCII siRNA sense strands
  misc_feature 1..21: note = Description of source:Sense strand ID:
  modified_base 1: mod_base = OTHER; note = 2'O-methyl-guanosine
  modified_base 2: mod_base = OTHER; note = 2'O-methyl-adenosine
  modified_base 3: mod_base = OTHER; note = 2'O-methyl-guanosine
  modified_base 4: mod_base = OTHER; note = 2'O-methyl-cytidine
  modified_base 5: mod_base = OTHER; note = 2'O-methyl-cytidine
  modified_base 6: mod_base = OTHER; note = 2'O-methyl-guanosine
  modified_base 7: mod_base = OTHER; note = 2' Fluoro-guanosine
  modified_base 8: mod_base = OTHER; note = 2'O-methyl-adenosine
  modified_base 9: mod_base = OTHER; note = 2' Fluoro-uridine
  modified_base 10: mod_base = OTHER; note = 2' Fluoro-cytidine
  modified_base 11: mod_base = OTHER; note = 2' Fluoro-cytidine
  modified_base 12: mod_base = OTHER; note = 2'Fluoro-adenosine
  modified_base 13: mod_base = OTHER; note = 2'O-methyl-guanosine
  modified_base 14: mod_base = OTHER; note = 2'O-methyl-cytidine
  modified_base 15: mod_base = OTHER; note = 2'O-methyl-guanosine
  modified_base 16: mod_base = OTHER; note = 2'O-methyl-uridine
  modified_base 17: mod_base = OTHER; note = 2'O-methyl-cytidine
  modified_base 18: mod_base = OTHER; note = 2'O-methyl-uridine
  modified_base 19: mod_base = OTHER; note = 2'O-methyl-uridine
  modified_base 20: mod_base = OTHER; note = 2'O-methyl-adenosine
  modified_base 21: mod_base = OTHER; note = 2'O-methyl-adenosine
  modified_base 1..2: mod_base = OTHER; note = phosphorothioate linkage
  modified_base 2..3: mod_base = OTHER; note = phosphorothioate linkage
  source 1..21: mol_type = other RNA
gagccggatccagcgtcttaa

SEQ ID NO: 354 - RNA, 21 nt, synthetic construct
  misc_feature 1..21: note = Description of origin: HCII siRNA sense strands
  misc_feature 1..21: note = Description of source:Sense strand ID:
  modified_base 1: mod_base = OTHER; note = 2'O-methyl-adenosine
  modified_base 2: mod_base = OTHER; note = 2'O-methyl-uridine
  modified_base 3: mod_base = OTHER; note = 2'O-methyl-cytidine
  modified_base 4: mod_base = OTHER; note = 2'O-methyl-cytidine
  modified_base 5: mod_base = OTHER; note = 2'O-methyl-adenosine
  modified_base 6: mod_base = OTHER; note = 2'O-methyl-guanosine
  modified_base 7: mod_base = OTHER; note = 2' Fluoro-cytidine
  modified_base 8: mod_base = OTHER; note = 2'O-methyl-guanosine
  modified_base 9: mod_base = OTHER; note = 2' Fluoro-uridine
  modified_base 10: mod_base = OTHER; note = 2' Fluoro-cytidine
  modified_base 11: mod_base = OTHER; note = 2' Fluoro-uridine
  modified_base 12: mod_base = OTHER; note = 2' Fluoro-uridine
  modified_base 13: mod_base = OTHER; note = 2'O-methyl-adenosine
  modified_base 14: mod_base = OTHER; note = 2'O-methyl-adenosine
  modified_base 15: mod_base = OTHER; note = 2'O-methyl-cytidine
  modified_base 16: mod_base = OTHER; note = 2'O-methyl-adenosine
  modified_base 17: mod_base = OTHER; note = 2'O-methyl-uridine
  modified_base 18: mod_base = OTHER; note = 2'O-methyl-cytidine
  modified_base 19: mod_base = OTHER; note = 2'O-methyl-cytidine
  modified_base 20: mod_base = OTHER; note = 2'O-methyl-uridine
  modified_base 21: mod_base = OTHER; note = 2'O-methyl-cytidine
  modified_base 1..2: mod_base = OTHER; note = phosphorothioate linkage
  modified_base 2..3: mod_base = OTHER; note = phosphorothioate linkage
  source 1..21: mol_type = other RNA
atccagcgtcttaacatcctc

SEQ ID NO: 355 - RNA, 21 nt, synthetic construct
  misc_feature 1..21: note = Description of origin: HCII siRNA sense strands
  misc_feature 1..21: note = Description of source:Sense strand ID:
  modified_base 1: mod_base = OTHER; note = 2'O-methyl-cytidine
  modified_base 2: mod_base = OTHER; note = 2'O-methyl-adenosine
  modified_base 3: mod_base = OTHER; note = 2'O-methyl-adenosine
  modified_base 4: mod_base = OTHER; note = 2'O-methyl-adenosine
  modified_base 5: mod_base = OTHER; note = 2'O-methyl-adenosine
  modified_base 6: mod_base = OTHER; note = 2'O-methyl-adenosine
  modified_base 7: mod_base = OTHER; note = 2'Fluoro-adenosine
  modified_base 8: mod_base = OTHER; note = 2'O-methyl-guanosine
  modified_base 9: mod_base = OTHER; note = 2' Fluoro-cytidine
  modified_base 10: mod_base = OTHER; note = 2'Fluoro-adenosine
  modified_base 11: mod_base = OTHER; note = 2' Fluoro-uridine
  modified_base 12: mod_base = OTHER; note = 2' Fluoro-guanosine
  modified_base 13: mod_base = OTHER; note = 2'O-methyl-adenosine
  modified_base 14: mod_base = OTHER; note = 2'O-methyl-cytidine
  modified_base 15: mod_base = OTHER; note = 2'O-methyl-adenosine
  modified_base 16: mod_base = OTHER; note = 2'O-methyl-adenosine
  modified_base 17: mod_base = OTHER; note = 2'O-methyl-adenosine
  modified_base 18: mod_base = OTHER; note = 2'O-methyl-cytidine
  modified_base 19: mod_base = OTHER; note = 2'O-methyl-adenosine
  modified_base 20: mod_base = OTHER; note = 2'O-methyl-guanosine
  modified_base 21: mod_base = OTHER; note = 2'O-methyl-adenosine
  modified_base 1..2: mod_base = OTHER; note = phosphorothioate linkage
  modified_base 2..3: mod_base = OTHER; note = phosphorothioate linkage
  source 1..21: mol_type = other RNA
caaaaaagcatgacaaacaga

SEQ ID NO: 356 - RNA, 21 nt, synthetic construct
  misc_feature 1..21: note = Description of origin: HCII siRNA sense strands
  misc_feature 1..21: note = Description of source:Sense strand ID:
  modified_base 1: mod_base = OTHER; note = 2'O-methyl-cytidine
  modified_base 2: mod_base = OTHER; note = 2'O-methyl-adenosine
  modified_base 3: mod_base = OTHER; note = 2'O-methyl-guanosine
  modified_base 4: mod_base = OTHER; note = 2'O-methyl-guanosine
  modified_base 5: mod_base = OTHER; note = 2'O-methyl-adenosine
  modified_base 6: mod_base = OTHER; note = 2'O-methyl-guanosine
  modified_base 7: mod_base = OTHER; note = 2' Fluoro-guanosine
  modified_base 8: mod_base = OTHER; note = 2'O-methyl-adenosine
  modified_base 9: mod_base = OTHER; note = 2'Fluoro-adenosine
  modified_base 10: mod_base = OTHER; note = 2' Fluoro-uridine
  modified_base 11: mod_base = OTHER; note = 2' Fluoro-uridine
  modified_base 12: mod_base = OTHER; note = 2' Fluoro-uridine
  modified_base 13: mod_base = OTHER; note = 2'O-methyl-uridine
  modified_base 14: mod_base = OTHER; note = 2'O-methyl-guanosine
  modified_base 15: mod_base = OTHER; note = 2'O-methyl-guanosine
  modified_base 16: mod_base = OTHER; note = 2'O-methyl-guanosine
  modified_base 17: mod_base = OTHER; note = 2'O-methyl-uridine
  modified_base 18: mod_base = OTHER; note = 2'O-methyl-adenosine
  modified_base 19: mod_base = OTHER; note = 2'O-methyl-cytidine
  modified_base 20: mod_base = OTHER; note = 2'O-methyl-adenosine
  modified_base 21: mod_base = OTHER; note = 2'O-methyl-cytidine
  modified_base 1..2: mod_base = OTHER; note = phosphorothioate linkage
  modified_base 2..3: mod_base = OTHER; note = phosphorothioate linkage
  source 1..21: mol_type = other RNA
caggaggaattttgggtacac

SEQ ID NO: 357 - RNA, 21 nt, synthetic construct
  misc_feature 1..21: note = Description of origin: HCII siRNA sense strands
  misc_feature 1..21: note = Description of source:Sense strand ID:
  modified_base 1: mod_base = OTHER; note = 2'O-methyl-cytidine
  modified_base 2: mod_base = OTHER; note = 2'O-methyl-adenosine
  modified_base 3: mod_base = OTHER; note = 2'O-methyl-adenosine
  modified_base 4: mod_base = OTHER; note = 2'O-methyl-cytidine
  modified_base 5: mod_base = OTHER; note = 2'O-methyl-cytidine
  modified_base 6: mod_base = OTHER; note = 2'O-methyl-adenosine
  modified_base 7: mod_base = OTHER; note = 2' Fluoro-cytidine
  modified_base 8: mod_base = OTHER; note = 2'O-methyl-adenosine
  modified_base 9: mod_base = OTHER; note = 2'Fluoro-adenosine
  modified_base 10: mod_base = OTHER; note = 2' Fluoro-cytidine
  modified_base 11: mod_base = OTHER; note = 2' Fluoro-uridine
  modified_base 12: mod_base = OTHER; note = 2' Fluoro-uridine
  modified_base 13: mod_base = OTHER; note = 2'O-methyl-cytidine
  modified_base 14: mod_base = OTHER; note = 2'O-methyl-cytidine
  modified_base 15: mod_base = OTHER; note = 2'O-methyl-guanosine
  modified_base 16: mod_base = OTHER; note = 2'O-methyl-guanosine
  modified_base 17: mod_base = OTHER; note = 2'O-methyl-cytidine
  modified_base 18: mod_base = OTHER; note = 2'O-methyl-uridine
  modified_base 19: mod_base = OTHER; note = 2'O-methyl-guanosine
  modified_base 20: mod_base = OTHER; note = 2'O-methyl-adenosine
  modified_base 21: mod_base = OTHER; note = 2'O-methyl-adenosine
  modified_base 1..2: mod_base = OTHER; note = phosphorothioate linkage
  modified_base 2..3: mod_base = OTHER; note = phosphorothioate linkage
  source 1..21: mol_type = other RNA
caaccacaacttccggctgaa

SEQ ID NO: 358 - RNA, 21 nt, synthetic construct
  misc_feature 1..21: note = Description of origin: HCII siRNA sense strands
  misc_feature 1..21: note = Description of source:Sense strand ID:
  modified_base 1: mod_base = OTHER; note = 2'O-methyl-guanosine
  modified_base 2: mod_base = OTHER; note = 2'O-methyl-guanosine
  modified_base 3: mod_base = OTHER; note = 2'O-methyl-cytidine
  modified_base 4: mod_base = OTHER; note = 2'O-methyl-adenosine
  modified_base 5: mod_base = OTHER; note = 2'O-methyl-adenosine
  modified_base 6: mod_base = OTHER; note = 2'O-methyl-adenosine
  modified_base 7: mod_base = OTHER; note = 2'Fluoro-adenosine
  modified_base 8: mod_base = OTHER; note = 2'O-methyl-adenosine
  modified_base 9: mod_base = OTHER; note = 2'Fluoro-adenosine
  modified_base 10: mod_base = OTHER; note = 2' Fluoro-guanosine
  modified_base 11: mod_base = OTHER; note = 2' Fluoro-cytidine
  modified_base 12: mod_base = OTHER; note = 2'Fluoro-adenosine
  modified_base 13: mod_base = OTHER; note = 2'O-methyl-uridine
  modified_base 14: mod_base = OTHER; note = 2'O-methyl-guanosine
  modified_base 15: mod_base = OTHER; note = 2'O-methyl-adenosine
  modified_base 16: mod_base = OTHER; note = 2'O-methyl-cytidine
  modified_base 17: mod_base = OTHER; note = 2'O-methyl-adenosine
  modified_base 18: mod_base = OTHER; note = 2'O-methyl-adenosine
  modified_base 19: mod_base = OTHER; note = 2'O-methyl-adenosine
  modified_base 20: mod_base = OTHER; note = 2'O-methyl-cytidine
  modified_base 21: mod_base = OTHER; note = 2'O-methyl-adenosine
  modified_base 1..2: mod_base = OTHER; note = phosphorothioate linkage
  modified_base 2..3: mod_base = OTHER; note = phosphorothioate linkage
  source 1..21: mol_type = other RNA
ggcaaaaaagcatgacaaaca

SEQ ID NO: 359 - RNA, 21 nt, synthetic construct
  misc_feature 1..21: note = Description of origin: HCII siRNA sense strands
  misc_feature 1..21: note = Description of source:Sense strand ID:
  modified_base 1: mod_base = OTHER; note = 2'O-methyl-guanosine
  modified_base 2: mod_base = OTHER; note = 2'O-methyl-adenosine
  modified_base 3: mod_base = OTHER; note = 2'O-methyl-adenosine
  modified_base 4: mod_base = OTHER; note = 2'O-methyl-uridine
  modified_base 5: mod_base = OTHER; note = 2'O-methyl-adenosine
  modified_base 6: mod_base = OTHER; note = 2'O-methyl-adenosine
  modified_base 7: mod_base = OTHER; note = 2'Fluoro-adenosine
  modified_base 8: mod_base = OTHER; note = 2'O-methyl-uridine
  modified_base 9: mod_base = OTHER; note = 2' Fluoro-uridine
  modified_base 10: mod_base = OTHER; note = 2' Fluoro-cytidine
  modified_base 11: mod_base = OTHER; note = 2' Fluoro-cytidine
  modified_base 12: mod_base = OTHER; note = 2' Fluoro-cytidine
  modified_base 13: mod_base = OTHER; note = 2'O-methyl-adenosine
  modified_base 14: mod_base = OTHER; note = 2'O-methyl-guanosine
  modified_base 15: mod_base = OTHER; note = 2'O-methyl-uridine
  modified_base 16: mod_base = OTHER; note = 2'O-methyl-guanosine
  modified_base 17: mod_base = OTHER; note = 2'O-methyl-guanosine
  modified_base 18: mod_base = OTHER; note = 2'O-methyl-adenosine
  modified_base 19: mod_base = OTHER; note = 2'O-methyl-adenosine
  modified_base 20: mod_base = OTHER; note = 2'O-methyl-adenosine
  modified_base 21: mod_base = OTHER; note = 2'O-methyl-uridine
  modified_base 1..2: mod_base = OTHER; note = phosphorothioate linkage
  modified_base 2..3: mod_base = OTHER; note = phosphorothioate linkage
  source 1..21: mol_type = other RNA
gaataaattcccagtggaaat

SEQ ID NO: 360 - RNA, 21 nt, synthetic construct
  misc_feature 1..21: note = Description of origin: HCII siRNA sense strands
  misc_feature 1..21: note = Description of source:Sense strand ID:
  modified_base 1: mod_base = OTHER; note = 2'O-methyl-guanosine
  modified_base 2: mod_base = OTHER; note = 2'O-methyl-guanosine
  modified_base 3: mod_base = OTHER; note = 2'O-methyl-guanosine
  modified_base 4: mod_base = OTHER; note = 2'O-methyl-cytidine
  modified_base 5: mod_base = OTHER; note = 2'O-methyl-adenosine
  modified_base 6: mod_base = OTHER; note = 2'O-methyl-uridine
  modified_base 7: mod_base = OTHER; note = 2' Fluoro-cytidine
  modified_base 8: mod_base = OTHER; note = 2'O-methyl-adenosine
  modified_base 9: mod_base = OTHER; note = 2' Fluoro-guanosine
  modified_base 10: mod_base = OTHER; note = 2' Fluoro-cytidine
  modified_base 11: mod_base = OTHER; note = 2'Fluoro-adenosine
  modified_base 12: mod_base = OTHER; note = 2' Fluoro-uridine
  modified_base 13: mod_base = OTHER; note = 2'O-methyl-guanosine
  modified_base 14: mod_base = OTHER; note = 2'O-methyl-cytidine
  modified_base 15: mod_base = OTHER; note = 2'O-methyl-uridine
  modified_base 16: mod_base = OTHER; note = 2'O-methyl-adenosine
  modified_base 17: mod_base = OTHER; note = 2'O-methyl-adenosine
  modified_base 18: mod_base = OTHER; note = 2'O-methyl-uridine
  modified_base 19: mod_base = OTHER; note = 2'O-methyl-uridine
  modified_base 20: mod_base = OTHER; note = 2'O-methyl-guanosine
  modified_base 21: mod_base = OTHER; note = 2'O-methyl-uridine
  modified_base 1..2: mod_base = OTHER; note = phosphorothioate linkage
  modified_base 2..3: mod_base = OTHER; note = phosphorothioate linkage
  source 1..21: mol_type = other RNA
gggcatcagcatgctaattgt

SEQ ID NO: 361 - RNA, 21 nt, synthetic construct
  misc_feature 1..21: note = Description of origin: HCII siRNA sense strands
  misc_feature 1..21: note = Description of source:Sense strand ID:
  modified_base 1: mod_base = OTHER; note = 2'O-methyl-adenosine
  modified_base 2: mod_base = OTHER; note = 2'O-methyl-adenosine
  modified_base 3: mod_base = OTHER; note = 2'O-methyl-adenosine
  modified_base 4: mod_base = OTHER; note = 2'O-methyl-adenosine
  modified_base 5: mod_base = OTHER; note = 2'O-methyl-adenosine
  modified_base 6: mod_base = OTHER; note = 2'O-methyl-guanosine
  modified_base 7: mod_base = OTHER; note = 2' Fluoro-cytidine
  modified_base 8: mod_base = OTHER; note = 2'O-methyl-adenosine
  modified_base 9: mod_base = OTHER; note = 2' Fluoro-uridine
  modified_base 10: mod_base = OTHER; note = 2' Fluoro-guanosine
  modified_base 11: mod_base = OTHER; note = 2'Fluoro-adenosine
  modified_base 12: mod_base = OTHER; note = 2' Fluoro-cytidine
  modified_base 13: mod_base = OTHER; note = 2'O-methyl-adenosine
  modified_base 14: mod_base = OTHER; note = 2'O-methyl-adenosine
  modified_base 15: mod_base = OTHER; note = 2'O-methyl-adenosine
  modified_base 16: mod_base = OTHER; note = 2'O-methyl-cytidine
  modified_base 17: mod_base = OTHER; note = 2'O-methyl-adenosine
  modified_base 18: mod_base = OTHER; note = 2'O-methyl-guanosine
  modified_base 19: mod_base = OTHER; note = 2'O-methyl-adenosine
  modified_base 20: mod_base = OTHER; note = 2'O-methyl-adenosine
  modified_base 21: mod_base = OTHER; note = 2'O-methyl-cytidine
  modified_base 1..2: mod_base = OTHER; note = phosphorothioate linkage
  modified_base 2..3: mod_base = OTHER; note = phosphorothioate linkage
  source 1..21: mol_type = other RNA
aaaaagcatgacaaacagaac

SEQ ID NO: 362 - RNA, 21 nt, synthetic construct
  misc_feature 1..21: note = Description of origin: HCII siRNA sense strands
  misc_feature 1..21: note = Description of source:Sense strand ID:
  modified_base 1: mod_base = OTHER; note = 2'O-methyl-guanosine
  modified_base 2: mod_base = OTHER; note = 2'O-methyl-adenosine
  modified_base 3: mod_base = OTHER; note = 2'O-methyl-guanosine
  modified_base 4: mod_base = OTHER; note = 2'O-methyl-uridine
  modified_base 5: mod_base = OTHER; note = 2'O-methyl-adenosine
  modified_base 6: mod_base = OTHER; note = 2'O-methyl-uridine
  modified_base 7: mod_base = OTHER; note = 2' Fluoro-uridine
  modified_base 8: mod_base = OTHER; note = 2'O-methyl-adenosine
  modified_base 9: mod_base = OTHER; note = 2' Fluoro-cytidine
  modified_base 10: mod_base = OTHER; note = 2' Fluoro-uridine
  modified_base 11: mod_base = OTHER; note = 2' Fluoro-uridine
  modified_base 12: mod_base = OTHER; note = 2' Fluoro-uridine
  modified_base 13: mod_base = OTHER; note = 2'O-methyl-guanosine
  modified_base 14: mod_base = OTHER; note = 2'O-methyl-cytidine
  modified_base 15: mod_base = OTHER; note = 2'O-methyl-uridine
  modified_base 16: mod_base = OTHER; note = 2'O-methyl-guanosine
  modified_base 17: mod_base = OTHER; note = 2'O-methyl-adenosine
  modified_base 18: mod_base = OTHER; note = 2'O-methyl-guanosine
  modified_base 19: mod_base = OTHER; note = 2'O-methyl-guanosine
  modified_base 20: mod_base = OTHER; note = 2'O-methyl-cytidine
  modified_base 21: mod_base = OTHER; note = 2'O-methyl-cytidine
  modified_base 1..2: mod_base = OTHER; note = phosphorothioate linkage
  modified_base 2..3: mod_base = OTHER; note = phosphorothioate linkage
  source 1..21: mol_type = other RNA
gagtattactttgctgaggcc

SEQ ID NO: 363 - RNA, 21 nt, synthetic construct
  misc_feature 1..21: note = Description of origin: siRNA sense strands
  misc_feature 1..21: note = Description of source:Sense strand ID:
  modified_base 1: mod_base = OTHER; note = 2'O-methyl-uridine
  modified_base 2: mod_base = OTHER; note = 2'O-methyl-guanosine
  modified_base 3: mod_base = OTHER; note = 2'O-methyl-cytidine
  modified_base 4: mod_base = OTHER; note = 2'O-methyl-cytidine
  modified_base 5: mod_base = OTHER; note = 2'O-methyl-uridine
  modified_base 6: mod_base = OTHER; note = 2'O-methyl-uridine
  modified_base 7: mod_base = OTHER; note = 2' Fluoro-cytidine
  modified_base 8: mod_base = OTHER; note = 2'Fluoro-adenosine
  modified_base 9: mod_base = OTHER; note = 2' Fluoro-uridine
  modified_base 10: mod_base = OTHER; note = 2' Fluoro-cytidine
  modified_base 11: mod_base = OTHER; note = 2' Fluoro-cytidine
  modified_base 12: mod_base = OTHER; note = 2'O-methyl-adenosine
  modified_base 13: mod_base = OTHER; note = 2'O-methyl-cytidine
  modified_base 14: mod_base = OTHER; note = 2'O-methyl-adenosine
  modified_base 15: mod_base = OTHER; note = 2'O-methyl-adenosine
  modified_base 16: mod_base = OTHER; note = 2'O-methyl-guanosine
  modified_base 17: mod_base = OTHER; note = 2'O-methyl-guanosine
  modified_base 18: mod_base = OTHER; note = 2'O-methyl-adenosine
  modified_base 19: mod_base = OTHER; note = 2' Fluoro-uridine
  modified_base 20: mod_base = OTHER; note = 2'O-methyl-uridine
  modified_base 21: mod_base = OTHER; note = 2'O-methyl-uridine
  modified_base 1..2: mod_base = OTHER; note = phosphorothioate linkage
  modified_base 2..3: mod_base = OTHER; note = phosphorothioate linkage
  source 1..21: mol_type = other RNA
tgccttcatccacaaggattt

SEQ ID NO: 364 - RNA, 21 nt, synthetic construct
  misc_feature 1..21: note = Description of origin: siRNA sense strands
  misc_feature 1..21: note = Description of source:Sense strand ID:
  modified_base 1: mod_base = OTHER; note = 2'O-methyl-uridine
  modified_base 2: mod_base = OTHER; note = 2'O-methyl-guanosine
  modified_base 3: mod_base = OTHER; note = 2'O-methyl-cytidine
  modified_base 4: mod_base = OTHER; note = 2'O-methyl-guanosine
  modified_base 5: mod_base = OTHER; note = 2'O-methyl-adenosine
  modified_base 6: mod_base = OTHER; note = 2'O-methyl-adenosine
  modified_base 7: mod_base = OTHER; note = 2'Fluoro-adenosine
  modified_base 8: mod_base = OTHER; note = 2' Fluoro-guanosine
  modified_base 9: mod_base = OTHER; note = 2'Fluoro-adenosine
  modified_base 10: mod_base = OTHER; note = 2' Fluoro-uridine
  modified_base 11: mod_base = OTHER; note = 2' Fluoro-cytidine
  modified_base 12: mod_base = OTHER; note = 2'O-methyl-uridine
  modified_base 13: mod_base = OTHER; note = 2'O-methyl-cytidine
  modified_base 14: mod_base = OTHER; note = 2'O-methyl-cytidine
  modified_base 15: mod_base = OTHER; note = 2'O-methyl-adenosine
  modified_base 16: mod_base = OTHER; note = 2'O-methyl-uridine
  modified_base 17: mod_base = OTHER; note = 2'O-methyl-guanosine
  modified_base 18: mod_base = OTHER; note = 2'O-methyl-adenosine
  modified_base 19: mod_base = OTHER; note = 2' Fluoro-guanosine
  modified_base 20: mod_base = OTHER; note = 2'O-methyl-guanosine
  modified_base 21: mod_base = OTHER; note = 2'O-methyl-cytidine
  modified_base 1..2: mod_base = OTHER; note = phosphorothioate linkage
  modified_base 2..3: mod_base = OTHER; note = phosphorothioate linkage
  source 1..21: mol_type = other RNA
tgcgaaagatctccatgaggc

SEQ ID NO: 365 - RNA, 21 nt, synthetic construct
  misc_feature 1..21: note = Description of origin: siRNA sense strands
  misc_feature 1..21: note = Description of source:Sense strand ID:
  modified_base 1: mod_base = OTHER; note = 2'O-methyl-guanosine
  modified_base 2: mod_base = OTHER; note = 2'O-methyl-cytidine
  modified_base 3: mod_base = OTHER; note = 2'O-methyl-uridine
  modified_base 4: mod_base = OTHER; note = 2'O-methyl-guanosine
  modified_base 5: mod_base = OTHER; note = 2'O-methyl-guanosine
  modified_base 6: mod_base = OTHER; note = 2'O-methyl-uridine
  modified_base 7: mod_base = OTHER; note = 2' Fluoro-guanosine
  modified_base 8: mod_base = OTHER; note = 2' Fluoro-guanosine
  modified_base 9: mod_base = OTHER; note = 2' Fluoro-uridine
  modified_base 10: mod_base = OTHER; note = 2' Fluoro-cytidine
  modified_base 11: mod_base = OTHER; note = 2' Fluoro-cytidine
  modified_base 12: mod_base = OTHER; note = 2'O-methyl-uridine
  modified_base 13: mod_base = OTHER; note = 2'O-methyl-cytidine
  modified_base 14: mod_base = OTHER; note = 2'O-methyl-adenosine
  modified_base 15: mod_base = OTHER; note = 2'O-methyl-uridine
  modified_base 16: mod_base = OTHER; note = 2'O-methyl-guanosine
  modified_base 17: mod_base = OTHER; note = 2'O-methyl-guanosine
  modified_base 18: mod_base = OTHER; note = 2'O-methyl-adenosine
  modified_base 19: mod_base = OTHER; note = 2' Fluoro-guanosine
  modified_base 20: mod_base = OTHER; note = 2'O-methyl-adenosine
  modified_base 21: mod_base = OTHER; note = 2'O-methyl-adenosine
  modified_base 1..2: mod_base = OTHER; note = phosphorothioate linkage
  modified_base 2..3: mod_base = OTHER; note = phosphorothioate linkage
  source 1..21: mol_type = other RNA
gctggtggtcctcatggagaa

SEQ ID NO: 366 - RNA, 21 nt, synthetic construct
  misc_feature 1..21: note = Description of origin: siRNA sense strands
  misc_feature 1..21: note = Description of source:Sense strand ID:
  modified_base 1: mod_base = OTHER; note = 2'O-methyl-guanosine
  modified_base 2: mod_base = OTHER; note = 2'O-methyl-cytidine
  modified_base 3: mod_base = OTHER; note = 2'O-methyl-guanosine
  modified_base 4: mod_base = OTHER; note = 2'O-methyl-adenosine
  modified_base 5: mod_base = OTHER; note = 2'O-methyl-adenosine
  modified_base 6: mod_base = OTHER; note = 2'O-methyl-adenosine
  modified_base 7: mod_base = OTHER; note = 2' Fluoro-guanosine
  modified_base 8: mod_base = OTHER; note = 2'Fluoro-adenosine
  modified_base 9: mod_base = OTHER; note = 2' Fluoro-uridine
  modified_base 10: mod_base = OTHER; note = 2' Fluoro-cytidine
  modified_base 11: mod_base = OTHER; note = 2' Fluoro-uridine
  modified_base 12: mod_base = OTHER; note = 2'O-methyl-cytidine
  modified_base 13: mod_base = OTHER; note = 2'O-methyl-cytidine
  modified_base 14: mod_base = OTHER; note = 2'O-methyl-adenosine
  modified_base 15: mod_base = OTHER; note = 2'O-methyl-uridine
  modified_base 16: mod_base = OTHER; note = 2'O-methyl-guanosine
  modified_base 17: mod_base = OTHER; note = 2'O-methyl-adenosine
  modified_base 18: mod_base = OTHER; note = 2'O-methyl-guanosine
  modified_base 19: mod_base = OTHER; note = 2' Fluoro-guanosine
  modified_base 20: mod_base = OTHER; note = 2'O-methyl-cytidine
  modified_base 21: mod_base = OTHER; note = 2'O-methyl-adenosine
  modified_base 1..2: mod_base = OTHER; note = phosphorothioate linkage
  modified_base 2..3: mod_base = OTHER; note = phosphorothioate linkage
  source 1..21: mol_type = other RNA
gcgaaagatctccatgaggca

SEQ ID NO: 367 - RNA, 21 nt, synthetic construct
  misc_feature 1..21: note = Description of origin: siRNA sense strands
  misc_feature 1..21: note = Description of source:Sense strand ID:
  modified_base 1: mod_base = OTHER; note = 2'O-methyl-guanosine
  modified_base 2: mod_base = OTHER; note = 2'O-methyl-uridine
  modified_base 3: mod_base = OTHER; note = 2'O-methyl-adenosine
  modified_base 4: mod_base = OTHER; note = 2'O-methyl-uridine
  modified_base 5: mod_base = OTHER; note = 2'O-methyl-guanosine
  modified_base 6: mod_base = OTHER; note = 2'O-methyl-adenosine
  modified_base 7: mod_base = OTHER; note = 2' Fluoro-guanosine
  modified_base 8: mod_base = OTHER; note = 2'Fluoro-adenosine
  modified_base 9: mod_base = OTHER; note = 2' Fluoro-uridine
  modified_base 10: mod_base = OTHER; note = 2' Fluoro-guanosine
  modified_base 11: mod_base = OTHER; note = 2' Fluoro-cytidine
  modified_base 12: mod_base = OTHER; note = 2'O-methyl-adenosine
  modified_base 13: mod_base = OTHER; note = 2'O-methyl-uridine
  modified_base 14: mod_base = OTHER; note = 2'O-methyl-guanosine
  modified_base 15: mod_base = OTHER; note = 2'O-methyl-adenosine
  modified_base 16: mod_base = OTHER; note = 2'O-methyl-guanosine
  modified_base 17: mod_base = OTHER; note = 2'O-methyl-cytidine
  modified_base 18: mod_base = OTHER; note = 2'O-methyl-uridine
  modified_base 19: mod_base = OTHER; note = 2' Fluoro-guanosine
  modified_base 20: mod_base = OTHER; note = 2'O-methyl-cytidine
  modified_base 21: mod_base = OTHER; note = 2'O-methyl-uridine
  modified_base 1..2: mod_base = OTHER; note = phosphorothioate linkage
  modified_base 2..3: mod_base = OTHER; note = phosphorothioate linkage
  source 1..21: mol_type = other RNA
gtatgagatgcatgagctgct

SEQ ID NO: 368 - RNA, 21 nt, synthetic construct
  misc_feature 1..21: note = Description of origin: siRNA sense strands
  misc_feature 1..21: note = Description of source:Sense strand ID:
  modified_base 1: mod_base = OTHER; note = 2'O-methyl-guanosine
  modified_base 2: mod_base = OTHER; note = 2'O-methyl-uridine
  modified_base 3: mod_base = OTHER; note = 2'O-methyl-uridine
  modified_base 4: mod_base = OTHER; note = 2'O-methyl-uridine
  modified_base 5: mod_base = OTHER; note = 2'O-methyl-guanosine
  modified_base 6: mod_base = OTHER; note = 2'O-methyl-adenosine
  modified_base 7: mod_base = OTHER; note = 2' Fluoro-uridine
  modified_base 8: mod_base = OTHER; note = 2' Fluoro-guanosine
  modified_base 9: mod_base = OTHER; note = 2'Fluoro-adenosine
  modified_base 10: mod_base = OTHER; note = 2' Fluoro-guanosine
  modified_base 11: mod_base = OTHER; note = 2'Fluoro-adenosine
  modified_base 12: mod_base = OTHER; note = 2'O-methyl-uridine
  modified_base 13: mod_base = OTHER; note = 2'O-methyl-uridine
  modified_base 14: mod_base = OTHER; note = 2'O-methyl-adenosine
  modified_base 15: mod_base = OTHER; note = 2'O-methyl-adenosine
  modified_base 16: mod_base = OTHER; note = 2'O-methyl-uridine
  modified_base 17: mod_base = OTHER; note = 2'O-methyl-cytidine
  modified_base 18: mod_base = OTHER; note = 2'O-methyl-cytidine
  modified_base 19: mod_base = OTHER; note = 2' Fluoro-uridine
  modified_base 20: mod_base = OTHER; note = 2'O-methyl-guanosine
  modified_base 21: mod_base = OTHER; note = 2'O-methyl-adenosine
  modified_base 1..2: mod_base = OTHER; note = phosphorothioate linkage
  modified_base 2..3: mod_base = OTHER; note = phosphorothioate linkage
  source 1..21: mol_type = other RNA
gtttgatgagattaatcctga

SEQ ID NO: 369 - RNA, 21 nt, synthetic construct
  misc_feature 1..21: note = Description of origin: siRNA sense strands
  misc_feature 1..21: note = Description of source:Sense strand ID:
  modified_base 1: mod_base = OTHER; note = 2'O-methyl-uridine
  modified_base 2: mod_base = OTHER; note = 2'O-methyl-guanosine
  modified_base 3: mod_base = OTHER; note = 2'O-methyl-adenosine
  modified_base 4: mod_base = OTHER; note = 2'O-methyl-guanosine
  modified_base 5: mod_base = OTHER; note = 2'O-methyl-adenosine
  modified_base 6: mod_base = OTHER; note = 2'O-methyl-uridine
  modified_base 7: mod_base = OTHER; note = 2' Fluoro-uridine
  modified_base 8: mod_base = OTHER; note = 2'Fluoro-adenosine
  modified_base 9: mod_base = OTHER; note = 2'Fluoro-adenosine
  modified_base 10: mod_base = OTHER; note = 2' Fluoro-uridine
  modified_base 11: mod_base = OTHER; note = 2' Fluoro-cytidine
  modified_base 12: mod_base = OTHER; note = 2'O-methyl-cytidine
  modified_base 13: mod_base = OTHER; note = 2'O-methyl-uridine
  modified_base 14: mod_base = OTHER; note = 2'O-methyl-guanosine
  modified_base 15: mod_base = OTHER; note = 2'O-methyl-adenosine
  modified_base 16: mod_base = OTHER; note = 2'O-methyl-adenosine
  modified_base 17: mod_base = OTHER; note = 2'O-methyl-adenosine
  modified_base 18: mod_base = OTHER; note = 2'O-methyl-cytidine
  modified_base 19: mod_base = OTHER; note = 2' Fluoro-cytidine
  modified_base 20: mod_base = OTHER; note = 2'O-methyl-adenosine
  modified_base 21: mod_base = OTHER; note = 2'O-methyl-adenosine
  modified_base 1..2: mod_base = OTHER; note = phosphorothioate linkage
  modified_base 2..3: mod_base = OTHER; note = phosphorothioate linkage
  source 1..21: mol_type = other RNA
tgagattaatcctgaaaccaa

SEQ ID NO: 370 - RNA, 21 nt, synthetic construct
  misc_feature 1..21: note = Description of origin: siRNA sense strands
  misc_feature 1..21: note = Description of source:Sense strand ID:
  modified_base 1: mod_base = OTHER; note = 2'O-methyl-uridine
  modified_base 2: mod_base = OTHER; note = 2'O-methyl-guanosine
  modified_base 3: mod_base = OTHER; note = 2'O-methyl-adenosine
  modified_base 4: mod_base = OTHER; note = 2'O-methyl-uridine
  modified_base 5: mod_base = OTHER; note = 2'O-methyl-guanosine
  modified_base 6: mod_base = OTHER; note = 2'O-methyl-adenosine
  modified_base 7: mod_base = OTHER; note = 2' Fluoro-guanosine
  modified_base 8: mod_base = OTHER; note = 2'Fluoro-adenosine
  modified_base 9: mod_base = OTHER; note = 2' Fluoro-uridine
  modified_base 10: mod_base = OTHER; note = 2' Fluoro-uridine
  modified_base 11: mod_base = OTHER; note = 2'Fluoro-adenosine
  modified_base 12: mod_base = OTHER; note = 2'O-methyl-adenosine
  modified_base 13: mod_base = OTHER; note = 2'O-methyl-uridine
  modified_base 14: mod_base = OTHER; note = 2'O-methyl-cytidine
  modified_base 15: mod_base = OTHER; note = 2'O-methyl-cytidine
  modified_base 16: mod_base = OTHER; note = 2'O-methyl-uridine
  modified_base 17: mod_base = OTHER; note = 2'O-methyl-guanosine
  modified_base 18: mod_base = OTHER; note = 2'O-methyl-adenosine
  modified_base 19: mod_base = OTHER; note = 2'Fluoro-adenosine
  modified_base 20: mod_base = OTHER; note = 2'O-methyl-adenosine
  modified_base 21: mod_base = OTHER; note = 2'O-methyl-cytidine
  modified_base 1..2: mod_base = OTHER; note = phosphorothioate linkage
  modified_base 2..3: mod_base = OTHER; note = phosphorothioate linkage
  source 1..21: mol_type = other RNA
tgatgagattaatcctgaaac

SEQ ID NO: 371 - RNA, 21 nt, synthetic construct
  misc_feature 1..21: note = Description of origin: siRNA sense strands
  misc_feature 1..21: note = Description of source:Sense strand ID:
  modified_base 1: mod_base = OTHER; note = 2'O-methyl-adenosine
  modified_base 2: mod_base = OTHER; note = 2'O-methyl-uridine
  modified_base 3: mod_base = OTHER; note = 2'O-methyl-guanosine
  modified_base 4: mod_base = OTHER; note = 2'O-methyl-adenosine
  modified_base 5: mod_base = OTHER; note = 2'O-methyl-guanosine
  modified_base 6: mod_base = OTHER; note = 2'O-methyl-adenosine
  modified_base 7: mod_base = OTHER; note = 2' Fluoro-uridine
  modified_base 8: mod_base = OTHER; note = 2' Fluoro-uridine
  modified_base 9: mod_base = OTHER; note = 2'Fluoro-adenosine
  modified_base 10: mod_base = OTHER; note = 2'Fluoro-adenosine
  modified_base 11: mod_base = OTHER; note = 2' Fluoro-uridine
  modified_base 12: mod_base = OTHER; note = 2'O-methyl-cytidine
  modified_base 13: mod_base = OTHER; note = 2'O-methyl-cytidine
  modified_base 14: mod_base = OTHER; note = 2'O-methyl-uridine
  modified_base 15: mod_base = OTHER; note = 2'O-methyl-guanosine
  modified_base 16: mod_base = OTHER; note = 2'O-methyl-adenosine
  modified_base 17: mod_base = OTHER; note = 2'O-methyl-adenosine
  modified_base 18: mod_base = OTHER; note = 2'O-methyl-adenosine
  modified_base 19: mod_base = OTHER; note = 2' Fluoro-cytidine
  modified_base 20: mod_base = OTHER; note = 2'O-methyl-cytidine
  modified_base 21: mod_base = OTHER; note = 2'O-methyl-adenosine
  modified_base 1..2: mod_base = OTHER; note = phosphorothioate linkage
  modified_base 2..3: mod_base = OTHER; note = phosphorothioate linkage
  source 1..21: mol_type = other RNA
atgagattaatcctgaaacca

SEQ ID NO: 372 - RNA, 21 nt, synthetic construct
  misc_feature 1..21: note = Description of origin: siRNA sense strands
  misc_feature 1..21: note = Description of source:Sense strand ID:
  modified_base 1: mod_base = OTHER; note = 2'O-methyl-guanosine
  modified_base 2: mod_base = OTHER; note = 2'O-methyl-adenosine
  modified_base 3: mod_base = OTHER; note = 2'O-methyl-uridine
  modified_base 4: mod_base = OTHER; note = 2'O-methyl-guanosine
  modified_base 5: mod_base = OTHER; note = 2'O-methyl-adenosine
  modified_base 6: mod_base = OTHER; note = 2'O-methyl-guanosine
  modified_base 7: mod_base = OTHER; note = 2'Fluoro-adenosine
  modified_base 8: mod_base = OTHER; note = 2' Fluoro-uridine
  modified_base 9: mod_base = OTHER; note = 2' Fluoro-uridine
  modified_base 10: mod_base = OTHER; note = 2'Fluoro-adenosine
  modified_base 11: mod_base = OTHER; note = 2'Fluoro-adenosine
  modified_base 12: mod_base = OTHER; note = 2'O-methyl-uridine
  modified_base 13: mod_base = OTHER; note = 2'O-methyl-cytidine
  modified_base 14: mod_base = OTHER; note = 2'O-methyl-cytidine
  modified_base 15: mod_base = OTHER; note = 2'O-methyl-uridine
  modified_base 16: mod_base = OTHER; note = 2'O-methyl-guanosine
  modified_base 17: mod_base = OTHER; note = 2'O-methyl-adenosine
  modified_base 18: mod_base = OTHER; note = 2'O-methyl-adenosine
  modified_base 19: mod_base = OTHER; note = 2'Fluoro-adenosine
  modified_base 20: mod_base = OTHER; note = 2'O-methyl-cytidine
  modified_base 21: mod_base = OTHER; note = 2'O-methyl-cytidine
  modified_base 1..2: mod_base = OTHER; note = phosphorothioate linkage
  modified_base 2..3: mod_base = OTHER; note = phosphorothioate linkage
  source 1..21: mol_type = other RNA
gatgagattaatcctgaaacc

SEQ ID NO: 373 - RNA, 21 nt, synthetic construct
  misc_feature 1..21: note = Description of origin: siRNA sense strands
  misc_feature 1..21: note = Description of source:Sense strand ID:
  modified_base 1: mod_base = OTHER; note = 2'O-methyl-cytidine
  modified_base 2: mod_base = OTHER; note = 2'O-methyl-uridine
  modified_base 3: mod_base = OTHER; note = 2'O-methyl-guanosine
  modified_base 4: mod_base = OTHER; note = 2'O-methyl-uridine
  modified_base 5: mod_base = OTHER; note = 2'O-methyl-uridine
  modified_base 6: mod_base = OTHER; note = 2'O-methyl-uridine
  modified_base 7: mod_base = OTHER; note = 2' Fluoro-guanosine
  modified_base 8: mod_base = OTHER; note = 2'Fluoro-adenosine
  modified_base 9: mod_base = OTHER; note = 2' Fluoro-uridine
  modified_base 10: mod_base = OTHER; note = 2' Fluoro-guanosine
  modified_base 11: mod_base = OTHER; note = 2'Fluoro-adenosine
  modified_base 12: mod_base = OTHER; note = 2'O-methyl-guanosine
  modified_base 13: mod_base = OTHER; note = 2'O-methyl-adenosine
  modified_base 14: mod_base = OTHER; note = 2'O-methyl-uridine
  modified_base 15: mod_base = OTHER; note = 2'O-methyl-uridine
  modified_base 16: mod_base = OTHER; note = 2'O-methyl-adenosine
  modified_base 17: mod_base = OTHER; note = 2'O-methyl-adenosine
  modified_base 18: mod_base = OTHER; note = 2'O-methyl-uridine
  modified_base 19: mod_base = OTHER; note = 2' Fluoro-cytidine
  modified_base 20: mod_base = OTHER; note = 2'O-methyl-cytidine
  modified_base 21: mod_base = OTHER; note = 2'O-methyl-uridine
  modified_base 1..2: mod_base = OTHER; note = phosphorothioate linkage
  modified_base 2..3: mod_base = OTHER; note = phosphorothioate linkage
  source 1..21: mol_type = other RNA
ctgtttgatgagattaatcct

SEQ ID NO: 374 - RNA, 21 nt, synthetic construct
  misc_feature 1..21: note = Description of origin: siRNA sense strands
  misc_feature 1..21: note = Description of source:Sense strand ID:
  modified_base 1: mod_base = OTHER; note = 2'O-methyl-uridine
  modified_base 2: mod_base = OTHER; note = 2'O-methyl-uridine
  modified_base 3: mod_base = OTHER; note = 2'O-methyl-uridine
  modified_base 4: mod_base = OTHER; note = 2'O-methyl-uridine
  modified_base 5: mod_base = OTHER; note = 2'O-methyl-guanosine
  modified_base 6: mod_base = OTHER; note = 2'O-methyl-cytidine
  modified_base 7: mod_base = OTHER; note = 2' Fluoro-cytidine
  modified_base 8: mod_base = OTHER; note = 2' Fluoro-uridine
  modified_base 9: mod_base = OTHER; note = 2' Fluoro-uridine
  modified_base 10: mod_base = OTHER; note = 2' Fluoro-cytidine
  modified_base 11: mod_base = OTHER; note = 2'Fluoro-adenosine
  modified_base 12: mod_base = OTHER; note = 2'O-methyl-uridine
  modified_base 13: mod_base = OTHER; note = 2'O-methyl-cytidine
  modified_base 14: mod_base = OTHER; note = 2'O-methyl-cytidine
  modified_base 15: mod_base = OTHER; note = 2'O-methyl-adenosine
  modified_base 16: mod_base = OTHER; note = 2'O-methyl-cytidine
  modified_base 17: mod_base = OTHER; note = 2'O-methyl-adenosine
  modified_base 18: mod_base = OTHER; note = 2'O-methyl-adenosine
  modified_base 19: mod_base = OTHER; note = 2' Fluoro-guanosine
  modified_base 20: mod_base = OTHER; note = 2'O-methyl-guanosine
  modified_base 21: mod_base = OTHER; note = 2'O-methyl-adenosine
  modified_base 1..2: mod_base = OTHER; note = phosphorothioate linkage
  modified_base 2..3: mod_base = OTHER; note = phosphorothioate linkage
  source 1..21: mol_type = other RNA
ttttgccttcatccacaagga

SEQ ID NO: 375 - RNA, 21 nt, synthetic construct
  misc_feature 1..21: note = Description of origin: siRNA sense strands
  misc_feature 1..21: note = Description of source:Sense strand ID:
  modified_base 1: mod_base = OTHER; note = 2'O-methyl-cytidine
  modified_base 2: mod_base = OTHER; note = 2'O-methyl-guanosine
  modified_base 3: mod_base = OTHER; note = 2'O-methyl-adenosine
  modified_base 4: mod_base = OTHER; note = 2'O-methyl-adenosine
  modified_base 5: mod_base = OTHER; note = 2'O-methyl-adenosine
  modified_base 6: mod_base = OTHER; note = 2'O-methyl-guanosine
  modified_base 7: mod_base = OTHER; note = 2'Fluoro-adenosine
  modified_base 8: mod_base = OTHER; note = 2' Fluoro-uridine
  modified_base 9: mod_base = OTHER; note = 2' Fluoro-cytidine
  modified_base 10: mod_base = OTHER; note = 2' Fluoro-uridine
  modified_base 11: mod_base = OTHER; note = 2' Fluoro-cytidine
  modified_base 12: mod_base = OTHER; note = 2'O-methyl-cytidine
  modified_base 13: mod_base = OTHER; note = 2'O-methyl-adenosine
  modified_base 14: mod_base = OTHER; note = 2'O-methyl-uridine
  modified_base 15: mod_base = OTHER; note = 2'O-methyl-guanosine
  modified_base 16: mod_base = OTHER; note = 2'O-methyl-adenosine
  modified_base 17: mod_base = OTHER; note = 2'O-methyl-guanosine
  modified_base 18: mod_base = OTHER; note = 2'O-methyl-guanosine
  modified_base 19: mod_base = OTHER; note = 2' Fluoro-cytidine
  modified_base 20: mod_base = OTHER; note = 2'O-methyl-adenosine
  modified_base 21: mod_base = OTHER; note = 2'O-methyl-cytidine
  modified_base 1..2: mod_base = OTHER; note = phosphorothioate linkage
  modified_base 2..3: mod_base = OTHER; note = phosphorothioate linkage
  source 1..21: mol_type = other RNA
cgaaagatctccatgaggcac

SEQ ID NO: 376 - RNA, 21 nt, synthetic construct
  misc_feature 1..21: note = Description of origin: siRNA sense strands
  misc_feature 1..21: note = Description of source:Sense strand ID:
  modified_base 1: mod_base = OTHER; note = 2'O-methyl-uridine
  modified_base 2: mod_base = OTHER; note = 2'O-methyl-guanosine
  modified_base 3: mod_base = OTHER; note = 2'O-methyl-cytidine
  modified_base 4: mod_base = OTHER; note = 2'O-methyl-uridine
  modified_base 5: mod_base = OTHER; note = 2'O-methyl-guanosine
  modified_base 6: mod_base = OTHER; note = 2'O-methyl-guanosine
  modified_base 7: mod_base = OTHER; note = 2' Fluoro-uridine
  modified_base 8: mod_base = OTHER; note = 2' Fluoro-guanosine
  modified_base 9: mod_base = OTHER; note = 2' Fluoro-guanosine
  modified_base 10: mod_base = OTHER; note = 2' Fluoro-uridine
  modified_base 11: mod_base = OTHER; note = 2' Fluoro-cytidine
  modified_base 12: mod_base = OTHER; note = 2'O-methyl-cytidine
  modified_base 13: mod_base = OTHER; note = 2'O-methyl-uridine
  modified_base 14: mod_base = OTHER; note = 2'O-methyl-cytidine
  modified_base 15: mod_base = OTHER; note = 2'O-methyl-adenosine
  modified_base 16: mod_base = OTHER; note = 2'O-methyl-uridine
  modified_base 17: mod_base = OTHER; note = 2'O-methyl-guanosine
  modified_base 18: mod_base = OTHER; note = 2'O-methyl-guanosine
  modified_base 19: mod_base = OTHER; note = 2'Fluoro-adenosine
  modified_base 20: mod_base = OTHER; note = 2'O-methyl-guanosine
  modified_base 21: mod_base = OTHER; note = 2'O-methyl-adenosine
  modified_base 1..2: mod_base = OTHER; note = phosphorothioate linkage
  modified_base 2..3: mod_base = OTHER; note = phosphorothioate linkage
  source 1..21: mol_type = other RNA
tgctggtggtcctcatggaga

SEQ ID NO: 377 - RNA, 21 nt, synthetic construct
  misc_feature 1..21: note = Description of origin: siRNA sense strands
  misc_feature 1..21: note = Description of source:Sense strand ID:
  modified_base 1: mod_base = OTHER; note = 2'O-methyl-cytidine
  modified_base 2: mod_base = OTHER; note = 2'O-methyl-cytidine
  modified_base 3: mod_base = OTHER; note = 2'O-methyl-uridine
  modified_base 4: mod_base = OTHER; note = 2'O-methyl-uridine
  modified_base 5: mod_base = OTHER; note = 2'O-methyl-cytidine
  modified_base 6: mod_base = OTHER; note = 2'O-methyl-adenosine
  modified_base 7: mod_base = OTHER; note = 2' Fluoro-uridine
  modified_base 8: mod_base = OTHER; note = 2' Fluoro-cytidine
  modified_base 9: mod_base = OTHER; note = 2' Fluoro-cytidine
  modified_base 10: mod_base = OTHER; note = 2'Fluoro-adenosine
  modified_base 11: mod_base = OTHER; note = 2' Fluoro-cytidine
  modified_base 12: mod_base = OTHER; note = 2'O-methyl-adenosine
  modified_base 13: mod_base = OTHER; note = 2'O-methyl-adenosine
  modified_base 14: mod_base = OTHER; note = 2'O-methyl-guanosine
  modified_base 15: mod_base = OTHER; note = 2'O-methyl-guanosine
  modified_base 16: mod_base = OTHER; note = 2'O-methyl-adenosine
  modified_base 17: mod_base = OTHER; note = 2'O-methyl-uridine
  modified_base 18: mod_base = OTHER; note = 2'O-methyl-uridine
  modified_base 19: mod_base = OTHER; note = 2' Fluoro-uridine
  modified_base 20: mod_base = OTHER; note = 2'O-methyl-uridine
  modified_base 21: mod_base = OTHER; note = 2'O-methyl-guanosine
  modified_base 1..2: mod_base = OTHER; note = phosphorothioate linkage
  modified_base 2..3: mod_base = OTHER; note = phosphorothioate linkage
  source 1..21: mol_type = other RNA
ccttcatccacaaggattttg

SEQ ID NO: 378 - RNA, 21 nt, synthetic construct
  misc_feature 1..21: note = Description of origin: siRNA sense strands
  misc_feature 1..21: note = Description of source:Sense strand ID:
  modified_base 1: mod_base = OTHER; note = 2'O-methyl-guanosine
  modified_base 2: mod_base = OTHER; note = 2'O-methyl-adenosine
  modified_base 3: mod_base = OTHER; note = 2'O-methyl-adenosine
  modified_base 4: mod_base = OTHER; note = 2'O-methyl-adenosine
  modified_base 5: mod_base = OTHER; note = 2'O-methyl-guanosine
  modified_base 6: mod_base = OTHER; note = 2'O-methyl-adenosine
  modified_base 7: mod_base = OTHER; note = 2' Fluoro-uridine
  modified_base 8: mod_base = OTHER; note = 2' Fluoro-cytidine
  modified_base 9: mod_base = OTHER; note = 2' Fluoro-uridine
  modified_base 10: mod_base = OTHER; note = 2' Fluoro-cytidine
  modified_base 11: mod_base = OTHER; note = 2' Fluoro-cytidine
  modified_base 12: mod_base = OTHER; note = 2'O-methyl-adenosine
  modified_base 13: mod_base = OTHER; note = 2'O-methyl-uridine
  modified_base 14: mod_base = OTHER; note = 2'O-methyl-guanosine
  modified_base 15: mod_base = OTHER; note = 2'O-methyl-adenosine
  modified_base 16: mod_base = OTHER; note = 2'O-methyl-guanosine
  modified_base 17: mod_base = OTHER; note = 2'O-methyl-guanosine
  modified_base 18: mod_base = OTHER; note = 2'O-methyl-cytidine
  modified_base 19: mod_base = OTHER; note = 2'Fluoro-adenosine
  modified_base 20: mod_base = OTHER; note = 2'O-methyl-cytidine
  modified_base 21: mod_base = OTHER; note = 2'O-methyl-guanosine
  modified_base 1..2: mod_base = OTHER; note = phosphorothioate linkage
  modified_base 2..3: mod_base = OTHER; note = phosphorothioate linkage
  source 1..21: mol_type = other RNA
gaaagatctccatgaggcacg

SEQ ID NO: 379 - RNA, 21 nt, synthetic construct
  misc_feature 1..21: note = Description of origin: siRNA sense strands
  misc_feature 1..21: note = Description of source:Sense strand ID:
  modified_base 1: mod_base = OTHER; note = 2'O-methyl-uridine
  modified_base 2: mod_base = OTHER; note = 2'O-methyl-uridine
  modified_base 3: mod_base = OTHER; note = 2'O-methyl-cytidine
  modified_base 4: mod_base = OTHER; note = 2'O-methyl-adenosine
  modified_base 5: mod_base = OTHER; note = 2'O-methyl-uridine
  modified_base 6: mod_base = OTHER; note = 2'O-methyl-cytidine
  modified_base 7: mod_base = OTHER; note = 2' Fluoro-cytidine
  modified_base 8: mod_base = OTHER; note = 2'Fluoro-adenosine
  modified_base 9: mod_base = OTHER; note = 2' Fluoro-cytidine
  modified_base 10: mod_base = OTHER; note = 2'Fluoro-adenosine
  modified_base 11: mod_base = OTHER; note = 2'Fluoro-adenosine
  modified_base 12: mod_base = OTHER; note = 2'O-methyl-guanosine
  modified_base 13: mod_base = OTHER; note = 2'O-methyl-guanosine
  modified_base 14: mod_base = OTHER; note = 2'O-methyl-adenosine
  modified_base 15: mod_base = OTHER; note = 2'O-methyl-uridine
  modified_base 16: mod_base = OTHER; note = 2'O-methyl-uridine
  modified_base 17: mod_base = OTHER; note = 2'O-methyl-uridine
  modified_base 18: mod_base = OTHER; note = 2'O-methyl-uridine
  modified_base 19: mod_base = OTHER; note = 2' Fluoro-guanosine
  modified_base 20: mod_base = OTHER; note = 2'O-methyl-adenosine
  modified_base 21: mod_base = OTHER; note = 2'O-methyl-uridine
  modified_base 1..2: mod_base = OTHER; note = phosphorothioate linkage
  modified_base 2..3: mod_base = OTHER; note = phosphorothioate linkage
  source 1..21: mol_type = other RNA
ttcatccacaaggattttgat

SEQ ID NO: 380 - RNA, 21 nt, synthetic construct
  misc_feature 1..21: note = Description of origin: siRNA sense strands
  misc_feature 1..21: note = Description of source:Sense strand ID:
  modified_base 1: mod_base = OTHER; note = 2'O-methyl-uridine
  modified_base 2: mod_base = OTHER; note = 2'O-methyl-uridine
  modified_base 3: mod_base = OTHER; note = 2'O-methyl-uridine
  modified_base 4: mod_base = OTHER; note = 2'O-methyl-guanosine
  modified_base 5: mod_base = OTHER; note = 2'O-methyl-adenosine
  modified_base 6: mod_base = OTHER; note = 2'O-methyl-uridine
  modified_base 7: mod_base = OTHER; note = 2' Fluoro-guanosine
  modified_base 8: mod_base = OTHER; note = 2'Fluoro-adenosine
  modified_base 9: mod_base = OTHER; note = 2' Fluoro-guanosine
  modified_base 10: mod_base = OTHER; note = 2'Fluoro-adenosine
  modified_base 11: mod_base = OTHER; note = 2' Fluoro-uridine
  modified_base 12: mod_base = OTHER; note = 2'O-methyl-uridine
  modified_base 13: mod_base = OTHER; note = 2'O-methyl-adenosine
  modified_base 14: mod_base = OTHER; note = 2'O-methyl-adenosine
  modified_base 15: mod_base = OTHER; note = 2'O-methyl-uridine
  modified_base 16: mod_base = OTHER; note = 2'O-methyl-cytidine
  modified_base 17: mod_base = OTHER; note = 2'O-methyl-cytidine
  modified_base 18: mod_base = OTHER; note = 2'O-methyl-uridine
  modified_base 19: mod_base = OTHER; note = 2' Fluoro-guanosine
  modified_base 20: mod_base = OTHER; note = 2'O-methyl-adenosine
  modified_base 21: mod_base = OTHER; note = 2'O-methyl-adenosine
  modified_base 1..2: mod_base = OTHER; note = phosphorothioate linkage
  modified_base 2..3: mod_base = OTHER; note = phosphorothioate linkage
  source 1..21: mol_type = other RNA
tttgatgagattaatcctgaa

SEQ ID NO: 381 - RNA, 21 nt, synthetic construct
  misc_feature 1..21: note = Description of origin: siRNA sense strands
  misc_feature 1..21: note = Description of source:Sense strand ID:
  modified_base 1: mod_base = OTHER; note = 2'O-methyl-uridine
  modified_base 2: mod_base = OTHER; note = 2'O-methyl-uridine
  modified_base 3: mod_base = OTHER; note = 2'O-methyl-guanosine
  modified_base 4: mod_base = OTHER; note = 2'O-methyl-cytidine
  modified_base 5: mod_base = OTHER; note = 2'O-methyl-cytidine
  modified_base 6: mod_base = OTHER; note = 2'O-methyl-uridine
  modified_base 7: mod_base = OTHER; note = 2' Fluoro-uridine
  modified_base 8: mod_base = OTHER; note = 2' Fluoro-cytidine
  modified_base 9: mod_base = OTHER; note = 2'Fluoro-adenosine
  modified_base 10: mod_base = OTHER; note = 2' Fluoro-uridine
  modified_base 11: mod_base = OTHER; note = 2' Fluoro-cytidine
  modified_base 12: mod_base = OTHER; note = 2'O-methyl-cytidine
  modified_base 13: mod_base = OTHER; note = 2'O-methyl-adenosine
  modified_base 14: mod_base = OTHER; note = 2'O-methyl-cytidine
  modified_base 15: mod_base = OTHER; note = 2'O-methyl-adenosine
  modified_base 16: mod_base = OTHER; note = 2'O-methyl-adenosine
  modified_base 17: mod_base = OTHER; note = 2'O-methyl-guanosine
  modified_base 18: mod_base = OTHER; note = 2'O-methyl-guanosine
  modified_base 19: mod_base = OTHER; note = 2'Fluoro-adenosine
  modified_base 20: mod_base = OTHER; note = 2'O-methyl-uridine
  modified_base 21: mod_base = OTHER; note = 2'O-methyl-uridine
  modified_base 1..2: mod_base = OTHER; note = phosphorothioate linkage
  modified_base 2..3: mod_base = OTHER; note = phosphorothioate linkage
  source 1..21: mol_type = other RNA
ttgccttcatccacaaggatt

SEQ ID NO: 382 - RNA, 21 nt, synthetic construct
  misc_feature 1..21: note = Description of origin: siRNA sense strands
  misc_feature 1..21: note = Description of source:Sense strand ID:
  modified_base 1: mod_base = OTHER; note = 2'O-methyl-guanosine
  modified_base 2: mod_base = OTHER; note = 2'O-methyl-adenosine
  modified_base 3: mod_base = OTHER; note = 2'O-methyl-uridine
  modified_base 4: mod_base = OTHER; note = 2'O-methyl-cytidine
  modified_base 5: mod_base = OTHER; note = 2'O-methyl-uridine
  modified_base 6: mod_base = OTHER; note = 2'O-methyl-cytidine
  modified_base 7: mod_base = OTHER; note = 2' Fluoro-cytidine
  modified_base 8: mod_base = OTHER; note = 2'Fluoro-adenosine
  modified_base 9: mod_base = OTHER; note = 2' Fluoro-uridine
  modified_base 10: mod_base = OTHER; note = 2' Fluoro-guanosine
  modified_base 11: mod_base = OTHER; note = 2'Fluoro-adenosine
  modified_base 12: mod_base = OTHER; note = 2'O-methyl-guanosine
  modified_base 13: mod_base = OTHER; note = 2'O-methyl-guanosine
  modified_base 14: mod_base = OTHER; note = 2'O-methyl-cytidine
  modified_base 15: mod_base = OTHER; note = 2'O-methyl-adenosine
  modified_base 16: mod_base = OTHER; note = 2'O-methyl-cytidine
  modified_base 17: mod_base = OTHER; note = 2'O-methyl-guanosine
  modified_base 18: mod_base = OTHER; note = 2'O-methyl-adenosine
  modified_base 19: mod_base = OTHER; note = 2' Fluoro-uridine
  modified_base 20: mod_base = OTHER; note = 2'O-methyl-guanosine
  modified_base 21: mod_base = OTHER; note = 2'O-methyl-guanosine
  modified_base 1..2: mod_base = OTHER; note = phosphorothioate linkage
  modified_base 2..3: mod_base = OTHER; note = phosphorothioate linkage
  source 1..21: mol_type = other RNA
gatctccatgaggcacgatgg

SEQ ID NO: 383 - RNA, 21 nt, synthetic construct
  misc_feature 1..21: note = Description of origin: siRNA sense strands
  misc_feature 1..21: note = Description of source:Sense strand ID:
  modified_base 1: mod_base = OTHER; note = 2'O-methyl-uridine
  modified_base 2: mod_base = OTHER; note = 2'O-methyl-guanosine
  modified_base 3: mod_base = OTHER; note = 2'O-methyl-cytidine
  modified_base 4: mod_base = OTHER; note = 2'O-methyl-cytidine
  modified_base 5: mod_base = OTHER; note = 2'O-methyl-uridine
  modified_base 6: mod_base = OTHER; note = 2' Fluoro-uridine
  modified_base 7: mod_base = OTHER; note = 2' Fluoro-cytidine
  modified_base 8: mod_base = OTHER; note = 2'O-methyl-adenosine
  modified_base 9: mod_base = OTHER; note = 2' Fluoro-uridine
  modified_base 10: mod_base = OTHER; note = 2' Fluoro-cytidine
  modified_base 11: mod_base = OTHER; note = 2' Fluoro-cytidine
  modified_base 12: mod_base = OTHER; note = 2'Fluoro-adenosine
  modified_base 13: mod_base = OTHER; note = 2'O-methyl-cytidine
  modified_base 14: mod_base = OTHER; note = 2'O-methyl-adenosine
  modified_base 15: mod_base = OTHER; note = 2'O-methyl-adenosine
  modified_base 16: mod_base = OTHER; note = 2'O-methyl-guanosine
  modified_base 17: mod_base = OTHER; note = 2'O-methyl-guanosine
  modified_base 18: mod_base = OTHER; note = 2'O-methyl-adenosine
  modified_base 19: mod_base = OTHER; note = 2'O-methyl-uridine
  modified_base 20: mod_base = OTHER; note = 2'O-methyl-uridine
  modified_base 21: mod_base = OTHER; note = 2'O-methyl-uridine
  modified_base 1..2: mod_base = OTHER; note = phosphorothioate linkage
  modified_base 2..3: mod_base = OTHER; note = phosphorothioate linkage
  source 1..21: mol_type = other RNA
tgccttcatccacaaggattt

SEQ ID NO: 384 - RNA, 21 nt, synthetic construct
  misc_feature 1..21: note = Description of origin: siRNA sense strands
  misc_feature 1..21: note = Description of source:Sense strand ID:
  modified_base 1: mod_base = OTHER; note = 2'O-methyl-uridine
  modified_base 2: mod_base = OTHER; note = 2'O-methyl-guanosine
  modified_base 3: mod_base = OTHER; note = 2'O-methyl-cytidine
  modified_base 4: mod_base = OTHER; note = 2'O-methyl-guanosine
  modified_base 5: mod_base = OTHER; note = 2'O-methyl-adenosine
  modified_base 6: mod_base = OTHER; note = 2'Fluoro-adenosine
  modified_base 7: mod_base = OTHER; note = 2'Fluoro-adenosine
  modified_base 8: mod_base = OTHER; note = 2'O-methyl-guanosine
  modified_base 9: mod_base = OTHER; note = 2'Fluoro-adenosine
  modified_base 10: mod_base = OTHER; note = 2' Fluoro-uridine
  modified_base 11: mod_base = OTHER; note = 2' Fluoro-cytidine
  modified_base 12: mod_base = OTHER; note = 2' Fluoro-uridine
  modified_base 13: mod_base = OTHER; note = 2'O-methyl-cytidine
  modified_base 14: mod_base = OTHER; note = 2'O-methyl-cytidine
  modified_base 15: mod_base = OTHER; note = 2'O-methyl-adenosine
  modified_base 16: mod_base = OTHER; note = 2'O-methyl-uridine
  modified_base 17: mod_base = OTHER; note = 2'O-methyl-guanosine
  modified_base 18: mod_base = OTHER; note = 2'O-methyl-adenosine
  modified_base 19: mod_base = OTHER; note = 2'O-methyl-guanosine
  modified_base 20: mod_base = OTHER; note = 2'O-methyl-guanosine
  modified_base 21: mod_base = OTHER; note = 2'O-methyl-cytidine
  modified_base 1..2: mod_base = OTHER; note = phosphorothioate linkage
  modified_base 2..3: mod_base = OTHER; note = phosphorothioate linkage
  source 1..21: mol_type = other RNA
tgcgaaagatctccatgaggc

SEQ ID NO: 385 - RNA, 21 nt, synthetic construct
  misc_feature 1..21: note = Description of origin: siRNA sense strands
  misc_feature 1..21: note = Description of source:Sense strand ID:
  modified_base 1: mod_base = OTHER; note = 2'O-methyl-guanosine
  modified_base 2: mod_base = OTHER; note = 2'O-methyl-cytidine
  modified_base 3: mod_base = OTHER; note = 2'O-methyl-uridine
  modified_base 4: mod_base = OTHER; note = 2'O-methyl-guanosine
  modified_base 5: mod_base = OTHER; note = 2'O-methyl-guanosine
  modified_base 6: mod_base = OTHER; note = 2' Fluoro-uridine
  modified_base 7: mod_base = OTHER; note = 2' Fluoro-guanosine
  modified_base 8: mod_base = OTHER; note = 2'O-methyl-guanosine
  modified_base 9: mod_base = OTHER; note = 2' Fluoro-uridine
  modified_base 10: mod_base = OTHER; note = 2' Fluoro-cytidine
  modified_base 11: mod_base = OTHER; note = 2' Fluoro-cytidine
  modified_base 12: mod_base = OTHER; note = 2' Fluoro-uridine
  modified_base 13: mod_base = OTHER; note = 2'O-methyl-cytidine
  modified_base 14: mod_base = OTHER; note = 2'O-methyl-adenosine
  modified_base 15: mod_base = OTHER; note = 2'O-methyl-uridine
  modified_base 16: mod_base = OTHER; note = 2'O-methyl-guanosine
  modified_base 17: mod_base = OTHER; note = 2'O-methyl-guanosine
  modified_base 18: mod_base = OTHER; note = 2'O-methyl-adenosine
  modified_base 19: mod_base = OTHER; note = 2'O-methyl-guanosine
  modified_base 20: mod_base = OTHER; note = 2'O-methyl-adenosine
  modified_base 21: mod_base = OTHER; note = 2'O-methyl-adenosine
  modified_base 1..2: mod_base = OTHER; note = phosphorothioate linkage
  modified_base 2..3: mod_base = OTHER; note = phosphorothioate linkage
  source 1..21: mol_type = other RNA
gctggtggtcctcatggagaa

SEQ ID NO: 386 - RNA, 21 nt, synthetic construct
  misc_feature 1..21: note = Description of origin: siRNA sense strands
  misc_feature 1..21: note = Description of source:Sense strand ID:
  modified_base 1: mod_base = OTHER; note = 2'O-methyl-guanosine
  modified_base 2: mod_base = OTHER; note = 2'O-methyl-cytidine
  modified_base 3: mod_base = OTHER; note = 2'O-methyl-guanosine
  modified_base 4: mod_base = OTHER; note = 2'O-methyl-adenosine
  modified_base 5: mod_base = OTHER; note = 2'O-methyl-adenosine
  modified_base 6: mod_base = OTHER; note = 2'Fluoro-adenosine
  modified_base 7: mod_base = OTHER; note = 2' Fluoro-guanosine
  modified_base 8: mod_base = OTHER; note = 2'O-methyl-adenosine
  modified_base 9: mod_base = OTHER; note = 2' Fluoro-uridine
  modified_base 10: mod_base = OTHER; note = 2' Fluoro-cytidine
  modified_base 11: mod_base = OTHER; note = 2' Fluoro-uridine
  modified_base 12: mod_base = OTHER; note = 2' Fluoro-cytidine
  modified_base 13: mod_base = OTHER; note = 2'O-methyl-cytidine
  modified_base 14: mod_base = OTHER; note = 2'O-methyl-adenosine
  modified_base 15: mod_base = OTHER; note = 2'O-methyl-uridine
  modified_base 16: mod_base = OTHER; note = 2'O-methyl-guanosine
  modified_base 17: mod_base = OTHER; note = 2'O-methyl-adenosine
  modified_base 18: mod_base = OTHER; note = 2'O-methyl-guanosine
  modified_base 19: mod_base = OTHER; note = 2'O-methyl-guanosine
  modified_base 20: mod_base = OTHER; note = 2'O-methyl-cytidine
  modified_base 21: mod_base = OTHER; note = 2'O-methyl-adenosine
  modified_base 1..2: mod_base = OTHER; note = phosphorothioate linkage
  modified_base 2..3: mod_base = OTHER; note = phosphorothioate linkage
  source 1..21: mol_type = other RNA
gcgaaagatctccatgaggca

SEQ ID NO: 387 - RNA, 21 nt, synthetic construct
  misc_feature 1..21: note = Description of origin: siRNA sense strands
  misc_feature 1..21: note = Description of source:Sense strand ID:
  modified_base 1: mod_base = OTHER; note = 2'O-methyl-guanosine
  modified_base 2: mod_base = OTHER; note = 2'O-methyl-uridine
  modified_base 3: mod_base = OTHER; note = 2'O-methyl-adenosine
  modified_base 4: mod_base = OTHER; note = 2'O-methyl-uridine
  modified_base 5: mod_base = OTHER; note = 2'O-methyl-guanosine
  modified_base 6: mod_base = OTHER; note = 2'Fluoro-adenosine
  modified_base 7: mod_base = OTHER; note = 2' Fluoro-guanosine
  modified_base 8: mod_base = OTHER; note = 2'O-methyl-adenosine
  modified_base 9: mod_base = OTHER; note = 2' Fluoro-uridine
  modified_base 10: mod_base = OTHER; note = 2' Fluoro-guanosine
  modified_base 11: mod_base = OTHER; note = 2' Fluoro-cytidine
  modified_base 12: mod_base = OTHER; note = 2'Fluoro-adenosine
  modified_base 13: mod_base = OTHER; note = 2'O-methyl-uridine
  modified_base 14: mod_base = OTHER; note = 2'O-methyl-guanosine
  modified_base 15: mod_base = OTHER; note = 2'O-methyl-adenosine
  modified_base 16: mod_base = OTHER; note = 2'O-methyl-guanosine
  modified_base 17: mod_base = OTHER; note = 2'O-methyl-cytidine
  modified_base 18: mod_base = OTHER; note = 2'O-methyl-uridine
  modified_base 19: mod_base = OTHER; note = 2'O-methyl-guanosine
  modified_base 20: mod_base = OTHER; note = 2'O-methyl-cytidine
  modified_base 21: mod_base = OTHER; note = 2'O-methyl-uridine
  modified_base 1..2: mod_base = OTHER; note = phosphorothioate linkage
  modified_base 2..3: mod_base = OTHER; note = phosphorothioate linkage
  source 1..21: mol_type = other RNA
gtatgagatgcatgagctgct

SEQ ID NO: 388 - RNA, 21 nt, synthetic construct
  misc_feature 1..21: note = Description of origin: siRNA sense strands
  misc_feature 1..21: note = Description of source:Sense strand ID:
  modified_base 1: mod_base = OTHER; note = 2'O-methyl-guanosine
  modified_base 2: mod_base = OTHER; note = 2'O-methyl-uridine
  modified_base 3: mod_base = OTHER; note = 2'O-methyl-uridine
  modified_base 4: mod_base = OTHER; note = 2'O-methyl-uridine
  modified_base 5: mod_base = OTHER; note = 2'O-methyl-guanosine
  modified_base 6: mod_base = OTHER; note = 2'Fluoro-adenosine
  modified_base 7: mod_base = OTHER; note = 2' Fluoro-uridine
  modified_base 8: mod_base = OTHER; note = 2'O-methyl-guanosine
  modified_base 9: mod_base = OTHER; note = 2'Fluoro-adenosine
  modified_base 10: mod_base = OTHER; note = 2' Fluoro-guanosine
  modified_base 11: mod_base = OTHER; note = 2'Fluoro-adenosine
  modified_base 12: mod_base = OTHER; note = 2' Fluoro-uridine
  modified_base 13: mod_base = OTHER; note = 2'O-methyl-uridine
  modified_base 14: mod_base = OTHER; note = 2'O-methyl-adenosine
  modified_base 15: mod_base = OTHER; note = 2'O-methyl-adenosine
  modified_base 16: mod_base = OTHER; note = 2'O-methyl-uridine
  modified_base 17: mod_base = OTHER; note = 2'O-methyl-cytidine
  modified_base 18: mod_base = OTHER; note = 2'O-methyl-cytidine
  modified_base 19: mod_base = OTHER; note = 2'O-methyl-uridine
  modified_base 20: mod_base = OTHER; note = 2'O-methyl-guanosine
  modified_base 21: mod_base = OTHER; note = 2'O-methyl-adenosine
  modified_base 1..2: mod_base = OTHER; note = phosphorothioate linkage
  modified_base 2..3: mod_base = OTHER; note = phosphorothioate linkage
  source 1..21: mol_type = other RNA
gtttgatgagattaatcctga

SEQ ID NO: 389 - RNA, 21 nt, synthetic construct
  misc_feature 1..21: note = Description of origin: siRNA sense strands
  misc_feature 1..21: note = Description of source:Sense strand ID:
  modified_base 1: mod_base = OTHER; note = 2'O-methyl-uridine
  modified_base 2: mod_base = OTHER; note = 2'O-methyl-guanosine
  modified_base 3: mod_base = OTHER; note = 2'O-methyl-adenosine
  modified_base 4: mod_base = OTHER; note = 2'O-methyl-guanosine
  modified_base 5: mod_base = OTHER; note = 2'O-methyl-adenosine
  modified_base 6: mod_base = OTHER; note = 2' Fluoro-uridine
  modified_base 7: mod_base = OTHER; note = 2' Fluoro-uridine
  modified_base 8: mod_base = OTHER; note = 2'O-methyl-adenosine
  modified_base 9: mod_base = OTHER; note = 2'Fluoro-adenosine
  modified_base 10: mod_base = OTHER; note = 2' Fluoro-uridine
  modified_base 11: mod_base = OTHER; note = 2' Fluoro-cytidine
  modified_base 12: mod_base = OTHER; note = 2' Fluoro-cytidine
  modified_base 13: mod_base = OTHER; note = 2'O-methyl-uridine
  modified_base 14: mod_base = OTHER; note = 2'O-methyl-guanosine
  modified_base 15: mod_base = OTHER; note = 2'O-methyl-adenosine
  modified_base 16: mod_base = OTHER; note = 2'O-methyl-adenosine
  modified_base 17: mod_base = OTHER; note = 2'O-methyl-adenosine
  modified_base 18: mod_base = OTHER; note = 2'O-methyl-cytidine
  modified_base 19: mod_base = OTHER; note = 2'O-methyl-cytidine
  modified_base 20: mod_base = OTHER; note = 2'O-methyl-adenosine
  modified_base 21: mod_base = OTHER; note = 2'O-methyl-adenosine
  modified_base 1..2: mod_base = OTHER; note = phosphorothioate linkage
  modified_base 2..3: mod_base = OTHER; note = phosphorothioate linkage
  source 1..21: mol_type = other RNA
tgagattaatcctgaaaccaa

SEQ ID NO: 390 - RNA, 21 nt, synthetic construct
  misc_feature 1..21: note = Description of origin: siRNA sense strands
  misc_feature 1..21: note = Description of source:Sense strand ID:
  modified_base 1: mod_base = OTHER; note = 2'O-methyl-uridine
  modified_base 2: mod_base = OTHER; note = 2'O-methyl-guanosine
  modified_base 3: mod_base = OTHER; note = 2'O-methyl-adenosine
  modified_base 4: mod_base = OTHER; note = 2'O-methyl-uridine
  modified_base 5: mod_base = OTHER; note = 2'O-methyl-guanosine
  modified_base 6: mod_base = OTHER; note = 2'Fluoro-adenosine
  modified_base 7: mod_base = OTHER; note = 2' Fluoro-guanosine
  modified_base 8: mod_base = OTHER; note = 2'O-methyl-adenosine
  modified_base 9: mod_base = OTHER; note = 2' Fluoro-uridine
  modified_base 10: mod_base = OTHER; note = 2' Fluoro-uridine
  modified_base 11: mod_base = OTHER; note = 2'Fluoro-adenosine
  modified_base 12: mod_base = OTHER; note = 2'Fluoro-adenosine
  modified_base 13: mod_base = OTHER; note = 2'O-methyl-uridine
  modified_base 14: mod_base = OTHER; note = 2'O-methyl-cytidine
  modified_base 15: mod_base = OTHER; note = 2'O-methyl-cytidine
  modified_base 16: mod_base = OTHER; note = 2'O-methyl-uridine
  modified_base 17: mod_base = OTHER; note = 2'O-methyl-guanosine
  modified_base 18: mod_base = OTHER; note = 2'O-methyl-adenosine
  modified_base 19: mod_base = OTHER; note = 2'O-methyl-adenosine
  modified_base 20: mod_base = OTHER; note = 2'O-methyl-adenosine
  modified_base 21: mod_base = OTHER; note = 2'O-methyl-cytidine
  modified_base 1..2: mod_base = OTHER; note = phosphorothioate linkage
  modified_base 2..3: mod_base = OTHER; note = phosphorothioate linkage
  source 1..21: mol_type = other RNA
tgatgagattaatcctgaaac

SEQ ID NO: 391 - RNA, 21 nt, synthetic construct
  misc_feature 1..21: note = Description of origin: siRNA sense strands
  misc_feature 1..21: note = Description of source:Sense strand ID:
  modified_base 1: mod_base = OTHER; note = 2'O-methyl-adenosine
  modified_base 2: mod_base = OTHER; note = 2'O-methyl-uridine
  modified_base 3: mod_base = OTHER; note = 2'O-methyl-guanosine
  modified_base 4: mod_base = OTHER; note = 2'O-methyl-adenosine
  modified_base 5: mod_base = OTHER; note = 2'O-methyl-guanosine
  modified_base 6: mod_base = OTHER; note = 2'Fluoro-adenosine
  modified_base 7: mod_base = OTHER; note = 2' Fluoro-uridine
  modified_base 8: mod_base = OTHER; note = 2'O-methyl-uridine
  modified_base 9: mod_base = OTHER; note = 2'Fluoro-adenosine
  modified_base 10: mod_base = OTHER; note = 2'Fluoro-adenosine
  modified_base 11: mod_base = OTHER; note = 2' Fluoro-uridine
  modified_base 12: mod_base = OTHER; note = 2' Fluoro-cytidine
  modified_base 13: mod_base = OTHER; note = 2'O-methyl-cytidine
  modified_base 14: mod_base = OTHER; note = 2'O-methyl-uridine
  modified_base 15: mod_base = OTHER; note = 2'O-methyl-guanosine
  modified_base 16: mod_base = OTHER; note = 2'O-methyl-adenosine
  modified_base 17: mod_base = OTHER; note = 2'O-methyl-adenosine
  modified_base 18: mod_base = OTHER; note = 2'O-methyl-adenosine
  modified_base 19: mod_base = OTHER; note = 2'O-methyl-cytidine
  modified_base 20: mod_base = OTHER; note = 2'O-methyl-cytidine
  modified_base 21: mod_base = OTHER; note = 2'O-methyl-adenosine
  modified_base 1..2: mod_base = OTHER; note = phosphorothioate linkage
  modified_base 2..3: mod_base = OTHER; note = phosphorothioate linkage
  source 1..21: mol_type = other RNA
atgagattaatcctgaaacca

SEQ ID NO: 392 - RNA, 21 nt, synthetic construct
  misc_feature 1..21: note = Description of origin: siRNA sense strands
  misc_feature 1..21: note = Description of source:Sense strand ID:
  modified_base 1: mod_base = OTHER; note = 2'O-methyl-guanosine
  modified_base 2: mod_base = OTHER; note = 2'O-methyl-adenosine
  modified_base 3: mod_base = OTHER; note = 2'O-methyl-uridine
  modified_base 4: mod_base = OTHER; note = 2'O-methyl-guanosine
  modified_base 5: mod_base = OTHER; note = 2'O-methyl-adenosine
  modified_base 6: mod_base = OTHER; note = 2' Fluoro-guanosine
  modified_base 7: mod_base = OTHER; note = 2'Fluoro-adenosine
  modified_base 8: mod_base = OTHER; note = 2'O-methyl-uridine
  modified_base 9: mod_base = OTHER; note = 2' Fluoro-uridine
  modified_base 10: mod_base = OTHER; note = 2'Fluoro-adenosine
  modified_base 11: mod_base = OTHER; note = 2'Fluoro-adenosine
  modified_base 12: mod_base = OTHER; note = 2' Fluoro-uridine
  modified_base 13: mod_base = OTHER; note = 2'O-methyl-cytidine
  modified_base 14: mod_base = OTHER; note = 2'O-methyl-cytidine
  modified_base 15: mod_base = OTHER; note = 2'O-methyl-uridine
  modified_base 16: mod_base = OTHER; note = 2'O-methyl-guanosine
  modified_base 17: mod_base = OTHER; note = 2'O-methyl-adenosine
  modified_base 18: mod_base = OTHER; note = 2'O-methyl-adenosine
  modified_base 19: mod_base = OTHER; note = 2'O-methyl-adenosine
  modified_base 20: mod_base = OTHER; note = 2'O-methyl-cytidine
  modified_base 21: mod_base = OTHER; note = 2'O-methyl-cytidine
  modified_base 1..2: mod_base = OTHER; note = phosphorothioate linkage
  modified_base 2..3: mod_base = OTHER; note = phosphorothioate linkage
  source 1..21: mol_type = other RNA
gatgagattaatcctgaaacc

SEQ ID NO: 393 - RNA, 21 nt, synthetic construct
  misc_feature 1..21: note = Description of origin: siRNA sense strands
  misc_feature 1..21: note = Description of source:Sense strand ID:
  modified_base 1: mod_base = OTHER; note = 2'O-methyl-cytidine
  modified_base 2: mod_base = OTHER; note = 2'O-methyl-uridine
  modified_base 3: mod_base = OTHER; note = 2'O-methyl-guanosine
  modified_base 4: mod_base = OTHER; note = 2'O-methyl-uridine
  modified_base 5: mod_base = OTHER; note = 2'O-methyl-uridine
  modified_base 6: mod_base = OTHER; note = 2' Fluoro-uridine
  modified_base 7: mod_base = OTHER; note = 2' Fluoro-guanosine
  modified_base 8: mod_base = OTHER; note = 2'O-methyl-adenosine
  modified_base 9: mod_base = OTHER; note = 2' Fluoro-uridine
  modified_base 10: mod_base = OTHER; note = 2' Fluoro-guanosine
  modified_base 11: mod_base = OTHER; note = 2'Fluoro-adenosine
  modified_base 12: mod_base = OTHER; note = 2' Fluoro-guanosine
  modified_base 13: mod_base = OTHER; note = 2'O-methyl-adenosine
  modified_base 14: mod_base = OTHER; note = 2'O-methyl-uridine
  modified_base 15: mod_base = OTHER; note = 2'O-methyl-uridine
  modified_base 16: mod_base = OTHER; note = 2'O-methyl-adenosine
  modified_base 17: mod_base = OTHER; note = 2'O-methyl-adenosine
  modified_base 18: mod_base = OTHER; note = 2'O-methyl-uridine
  modified_base 19: mod_base = OTHER; note = 2'O-methyl-cytidine
  modified_base 20: mod_base = OTHER; note = 2'O-methyl-cytidine
  modified_base 21: mod_base = OTHER; note = 2'O-methyl-uridine
  modified_base 1..2: mod_base = OTHER; note = phosphorothioate linkage
  modified_base 2..3: mod_base = OTHER; note = phosphorothioate linkage
  source 1..21: mol_type = other RNA
ctgtttgatgagattaatcct

SEQ ID NO: 394 - RNA, 21 nt, synthetic construct
  misc_feature 1..21: note = Description of origin: siRNA sense strands
  misc_feature 1..21: note = Description of source:Sense strand ID:
  modified_base 1: mod_base = OTHER; note = 2'O-methyl-uridine
  modified_base 2: mod_base = OTHER; note = 2'O-methyl-uridine
  modified_base 3: mod_base = OTHER; note = 2'O-methyl-uridine
  modified_base 4: mod_base = OTHER; note = 2'O-methyl-uridine
  modified_base 5: mod_base = OTHER; note = 2'O-methyl-guanosine
  modified_base 6: mod_base = OTHER; note = 2' Fluoro-cytidine
  modified_base 7: mod_base = OTHER; note = 2' Fluoro-cytidine
  modified_base 8: mod_base = OTHER; note = 2'O-methyl-uridine
  modified_base 9: mod_base = OTHER; note = 2' Fluoro-uridine
  modified_base 10: mod_base = OTHER; note = 2' Fluoro-cytidine
  modified_base 11: mod_base = OTHER; note = 2'Fluoro-adenosine
  modified_base 12: mod_base = OTHER; note = 2' Fluoro-uridine
  modified_base 13: mod_base = OTHER; note = 2'O-methyl-cytidine
  modified_base 14: mod_base = OTHER; note = 2'O-methyl-cytidine
  modified_base 15: mod_base = OTHER; note = 2'O-methyl-adenosine
  modified_base 16: mod_base = OTHER; note = 2'O-methyl-cytidine
  modified_base 17: mod_base = OTHER; note = 2'O-methyl-adenosine
  modified_base 18: mod_base = OTHER; note = 2'O-methyl-adenosine
  modified_base 19: mod_base = OTHER; note = 2'O-methyl-guanosine
  modified_base 20: mod_base = OTHER; note = 2'O-methyl-guanosine
  modified_base 21: mod_base = OTHER; note = 2'O-methyl-adenosine
  modified_base 1..2: mod_base = OTHER; note = phosphorothioate linkage
  modified_base 2..3: mod_base = OTHER; note = phosphorothioate linkage
  source 1..21: mol_type = other RNA
ttttgccttcatccacaagga

SEQ ID NO: 395 - RNA, 21 nt, synthetic construct
  misc_feature 1..21: note = Description of origin: siRNA sense strands
  misc_feature 1..21: note = Description of source:Sense strand ID:
  modified_base 1: mod_base = OTHER; note = 2'O-methyl-cytidine
  modified_base 2: mod_base = OTHER; note = 2'O-methyl-guanosine
  modified_base 3: mod_base = OTHER; note = 2'O-methyl-adenosine
  modified_base 4: mod_base = OTHER; note = 2'O-methyl-adenosine
  modified_base 5: mod_base = OTHER; note = 2'O-methyl-adenosine
  modified_base 6: mod_base = OTHER; note = 2' Fluoro-guanosine
  modified_base 7: mod_base = OTHER; note = 2'Fluoro-adenosine
  modified_base 8: mod_base = OTHER; note = 2'O-methyl-uridine
  modified_base 9: mod_base = OTHER; note = 2' Fluoro-cytidine
  modified_base 10: mod_base = OTHER; note = 2' Fluoro-uridine
  modified_base 11: mod_base = OTHER; note = 2' Fluoro-cytidine
  modified_base 12: mod_base = OTHER; note = 2' Fluoro-cytidine
  modified_base 13: mod_base = OTHER; note = 2'O-methyl-adenosine
  modified_base 14: mod_base = OTHER; note = 2'O-methyl-uridine
  modified_base 15: mod_base = OTHER; note = 2'O-methyl-guanosine
  modified_base 16: mod_base = OTHER; note = 2'O-methyl-adenosine
  modified_base 17: mod_base = OTHER; note = 2'O-methyl-guanosine
  modified_base 18: mod_base = OTHER; note = 2'O-methyl-guanosine
  modified_base 19: mod_base = OTHER; note = 2'O-methyl-cytidine
  modified_base 20: mod_base = OTHER; note = 2'O-methyl-adenosine
  modified_base 21: mod_base = OTHER; note = 2'O-methyl-cytidine
  modified_base 1..2: mod_base = OTHER; note = phosphorothioate linkage
  modified_base 2..3: mod_base = OTHER; note = phosphorothioate linkage
  source 1..21: mol_type = other RNA
cgaaagatctccatgaggcac

SEQ ID NO: 396 - RNA, 21 nt, synthetic construct
  misc_feature 1..21: note = Description of origin: siRNA sense strands
  misc_feature 1..21: note = Description of source:Sense strand ID:
  modified_base 1: mod_base = OTHER; note = 2'O-methyl-uridine
  modified_base 2: mod_base = OTHER; note = 2'O-methyl-guanosine
  modified_base 3: mod_base = OTHER; note = 2'O-methyl-cytidine
  modified_base 4: mod_base = OTHER; note = 2'O-methyl-uridine
  modified_base 5: mod_base = OTHER; note = 2'O-methyl-guanosine
  modified_base 6: mod_base = OTHER; note = 2' Fluoro-guanosine
  modified_base 7: mod_base = OTHER; note = 2' Fluoro-uridine
  modified_base 8: mod_base = OTHER; note = 2'O-methyl-guanosine
  modified_base 9: mod_base = OTHER; note = 2' Fluoro-guanosine
  modified_base 10: mod_base = OTHER; note = 2' Fluoro-uridine
  modified_base 11: mod_base = OTHER; note = 2' Fluoro-cytidine
  modified_base 12: mod_base = OTHER; note = 2' Fluoro-cytidine
  modified_base 13: mod_base = OTHER; note = 2'O-methyl-uridine
  modified_base 14: mod_base = OTHER; note = 2'O-methyl-cytidine
  modified_base 15: mod_base = OTHER; note = 2'O-methyl-adenosine
  modified_base 16: mod_base = OTHER; note = 2'O-methyl-uridine
  modified_base 17: mod_base = OTHER; note = 2'O-methyl-guanosine
  modified_base 18: mod_base = OTHER; note = 2'O-methyl-guanosine
  modified_base 19: mod_base = OTHER; note = 2'O-methyl-adenosine
  modified_base 20: mod_base = OTHER; note = 2'O-methyl-guanosine
  modified_base 21: mod_base = OTHER; note = 2'O-methyl-adenosine
  modified_base 1..2: mod_base = OTHER; note = phosphorothioate linkage
  modified_base 2..3: mod_base = OTHER; note = phosphorothioate linkage
  source 1..21: mol_type = other RNA
tgctggtggtcctcatggaga

SEQ ID NO: 397 - RNA, 21 nt, synthetic construct
  misc_feature 1..21: note = Description of origin: siRNA sense strands
  misc_feature 1..21: note = Description of source:Sense strand ID:
  modified_base 1: mod_base = OTHER; note = 2'O-methyl-cytidine
  modified_base 2: mod_base = OTHER; note = 2'O-methyl-cytidine
  modified_base 3: mod_base = OTHER; note = 2'O-methyl-uridine
  modified_base 4: mod_base = OTHER; note = 2'O-methyl-uridine
  modified_base 5: mod_base = OTHER; note = 2'O-methyl-cytidine
  modified_base 6: mod_base = OTHER; note = 2'Fluoro-adenosine
  modified_base 7: mod_base = OTHER; note = 2' Fluoro-uridine
  modified_base 8: mod_base = OTHER; note = 2'O-methyl-cytidine
  modified_base 9: mod_base = OTHER; note = 2' Fluoro-cytidine
  modified_base 10: mod_base = OTHER; note = 2'Fluoro-adenosine
  modified_base 11: mod_base = OTHER; note = 2' Fluoro-cytidine
  modified_base 12: mod_base = OTHER; note = 2'Fluoro-adenosine
  modified_base 13: mod_base = OTHER; note = 2'O-methyl-adenosine
  modified_base 14: mod_base = OTHER; note = 2'O-methyl-guanosine
  modified_base 15: mod_base = OTHER; note = 2'O-methyl-guanosine
  modified_base 16: mod_base = OTHER; note = 2'O-methyl-adenosine
  modified_base 17: mod_base = OTHER; note = 2'O-methyl-uridine
  modified_base 18: mod_base = OTHER; note = 2'O-methyl-uridine
  modified_base 19: mod_base = OTHER; note = 2'O-methyl-uridine
  modified_base 20: mod_base = OTHER; note = 2'O-methyl-uridine
  modified_base 21: mod_base = OTHER; note = 2'O-methyl-guanosine
  modified_base 1..2: mod_base = OTHER; note = phosphorothioate linkage
  modified_base 2..3: mod_base = OTHER; note = phosphorothioate linkage
  source 1..21: mol_type = other RNA
ccttcatccacaaggattttg

SEQ ID NO: 398 - RNA, 21 nt, synthetic construct
  misc_feature 1..21: note = Description of origin: siRNA sense strands
  misc_feature 1..21: note = Description of source:Sense strand ID:
  modified_base 1: mod_base = OTHER; note = 2'O-methyl-guanosine
  modified_base 2: mod_base = OTHER; note = 2'O-methyl-adenosine
  modified_base 3: mod_base = OTHER; note = 2'O-methyl-adenosine
  modified_base 4: mod_base = OTHER; note = 2'O-methyl-adenosine
  modified_base 5: mod_base = OTHER; note = 2'O-methyl-guanosine
  modified_base 6: mod_base = OTHER; note = 2'Fluoro-adenosine
  modified_base 7: mod_base = OTHER; note = 2' Fluoro-uridine
  modified_base 8: mod_base = OTHER; note = 2'O-methyl-cytidine
  modified_base 9: mod_base = OTHER; note = 2' Fluoro-uridine
  modified_base 10: mod_base = OTHER; note = 2' Fluoro-cytidine
  modified_base 11: mod_base = OTHER; note = 2' Fluoro-cytidine
  modified_base 12: mod_base = OTHER; note = 2'Fluoro-adenosine
  modified_base 13: mod_base = OTHER; note = 2'O-methyl-uridine
  modified_base 14: mod_base = OTHER; note = 2'O-methyl-guanosine
  modified_base 15: mod_base = OTHER; note = 2'O-methyl-adenosine
  modified_base 16: mod_base = OTHER; note = 2'O-methyl-guanosine
  modified_base 17: mod_base = OTHER; note = 2'O-methyl-guanosine
  modified_base 18: mod_base = OTHER; note = 2'O-methyl-cytidine
  modified_base 19: mod_base = OTHER; note = 2'O-methyl-adenosine
  modified_base 20: mod_base = OTHER; note = 2'O-methyl-cytidine
  modified_base 21: mod_base = OTHER; note = 2'O-methyl-guanosine
  modified_base 1..2: mod_base = OTHER; note = phosphorothioate linkage
  modified_base 2..3: mod_base = OTHER; note = phosphorothioate linkage
  source 1..21: mol_type = other RNA
gaaagatctccatgaggcacg

SEQ ID NO: 399 - RNA, 21 nt, synthetic construct
  misc_feature 1..21: note = Description of origin: siRNA sense strands
  misc_feature 1..21: note = Description of source:Sense strand ID:
  modified_base 1: mod_base = OTHER; note = 2'O-methyl-uridine
  modified_base 2: mod_base = OTHER; note = 2'O-methyl-uridine
  modified_base 3: mod_base = OTHER; note = 2'O-methyl-cytidine
  modified_base 4: mod_base = OTHER; note = 2'O-methyl-adenosine
  modified_base 5: mod_base = OTHER; note = 2'O-methyl-uridine
  modified_base 6: mod_base = OTHER; note = 2' Fluoro-cytidine
  modified_base 7: mod_base = OTHER; note = 2' Fluoro-cytidine
  modified_base 8: mod_base = OTHER; note = 2'O-methyl-adenosine
  modified_base 9: mod_base = OTHER; note = 2' Fluoro-cytidine
  modified_base 10: mod_base = OTHER; note = 2'Fluoro-adenosine
  modified_base 11: mod_base = OTHER; note = 2'Fluoro-adenosine
  modified_base 12: mod_base = OTHER; note = 2' Fluoro-guanosine
  modified_base 13: mod_base = OTHER; note = 2'O-methyl-guanosine
  modified_base 14: mod_base = OTHER; note = 2'O-methyl-adenosine
  modified_base 15: mod_base = OTHER; note = 2'O-methyl-uridine
  modified_base 16: mod_base = OTHER; note = 2'O-methyl-uridine
  modified_base 17: mod_base = OTHER; note = 2'O-methyl-uridine
  modified_base 18: mod_base = OTHER; note = 2'O-methyl-uridine
  modified_base 19: mod_base = OTHER; note = 2'O-methyl-guanosine
  modified_base 20: mod_base = OTHER; note = 2'O-methyl-adenosine
  modified_base 21: mod_base = OTHER; note = 2'O-methyl-uridine
  modified_base 1..2: mod_base = OTHER; note = phosphorothioate linkage
  modified_base 2..3: mod_base = OTHER; note = phosphorothioate linkage
  source 1..21: mol_type = other RNA
ttcatccacaaggattttgat

SEQ ID NO: 400 - RNA, 21 nt, synthetic construct
  misc_feature 1..21: note = Description of origin: siRNA sense strands
  misc_feature 1..21: note = Description of source:Sense strand ID:
  modified_base 1: mod_base = OTHER; note = 2'O-methyl-uridine
  modified_base 2: mod_base = OTHER; note = 2'O-methyl-uridine
  modified_base 3: mod_base = OTHER; note = 2'O-methyl-uridine
  modified_base 4: mod_base = OTHER; note = 2'O-methyl-guanosine
  modified_base 5: mod_base = OTHER; note = 2'O-methyl-adenosine
  modified_base 6: mod_base = OTHER; note = 2' Fluoro-uridine
  modified_base 7: mod_base = OTHER; note = 2' Fluoro-guanosine
  modified_base 8: mod_base = OTHER; note = 2'O-methyl-adenosine
  modified_base 9: mod_base = OTHER; note = 2' Fluoro-guanosine
  modified_base 10: mod_base = OTHER; note = 2'Fluoro-adenosine
  modified_base 11: mod_base = OTHER; note = 2' Fluoro-uridine
  modified_base 12: mod_base = OTHER; note = 2' Fluoro-uridine
  modified_base 13: mod_base = OTHER; note = 2'O-methyl-adenosine
  modified_base 14: mod_base = OTHER; note = 2'O-methyl-adenosine
  modified_base 15: mod_base = OTHER; note = 2'O-methyl-uridine
  modified_base 16: mod_base = OTHER; note = 2'O-methyl-cytidine
  modified_base 17: mod_base = OTHER; note = 2'O-methyl-cytidine
  modified_base 18: mod_base = OTHER; note = 2'O-methyl-uridine
  modified_base 19: mod_base = OTHER; note = 2'O-methyl-guanosine
  modified_base 20: mod_base = OTHER; note = 2'O-methyl-adenosine
  modified_base 21: mod_base = OTHER; note = 2'O-methyl-adenosine
  modified_base 1..2: mod_base = OTHER; note = phosphorothioate linkage
  modified_base 2..3: mod_base = OTHER; note = phosphorothioate linkage
  source 1..21: mol_type = other RNA
tttgatgagattaatcctgaa

SEQ ID NO: 401 - RNA, 21 nt, synthetic construct
  misc_feature 1..21: note = Description of origin: siRNA sense strands
  misc_feature 1..21: note = Description of source:Sense strand ID:
  modified_base 1: mod_base = OTHER; note = 2'O-methyl-uridine
  modified_base 2: mod_base = OTHER; note = 2'O-methyl-uridine
  modified_base 3: mod_base = OTHER; note = 2'O-methyl-guanosine
  modified_base 4: mod_base = OTHER; note = 2'O-methyl-cytidine
  modified_base 5: mod_base = OTHER; note = 2'O-methyl-cytidine
  modified_base 6: mod_base = OTHER; note = 2' Fluoro-uridine
  modified_base 7: mod_base = OTHER; note = 2' Fluoro-uridine
  modified_base 8: mod_base = OTHER; note = 2'O-methyl-cytidine
  modified_base 9: mod_base = OTHER; note = 2'Fluoro-adenosine
  modified_base 10: mod_base = OTHER; note = 2' Fluoro-uridine
  modified_base 11: mod_base = OTHER; note = 2' Fluoro-cytidine
  modified_base 12: mod_base = OTHER; note = 2' Fluoro-cytidine
  modified_base 13: mod_base = OTHER; note = 2'O-methyl-adenosine
  modified_base 14: mod_base = OTHER; note = 2'O-methyl-cytidine
  modified_base 15: mod_base = OTHER; note = 2'O-methyl-adenosine
  modified_base 16: mod_base = OTHER; note = 2'O-methyl-adenosine
  modified_base 17: mod_base = OTHER; note = 2'O-methyl-guanosine
  modified_base 18: mod_base = OTHER; note = 2'O-methyl-guanosine
  modified_base 19: mod_base = OTHER; note = 2'O-methyl-adenosine
  modified_base 20: mod_base = OTHER; note = 2'O-methyl-uridine
  modified_base 21: mod_base = OTHER; note = 2'O-methyl-uridine
  modified_base 1..2: mod_base = OTHER; note = phosphorothioate linkage
  modified_base 2..3: mod_base = OTHER; note = phosphorothioate linkage
  source 1..21: mol_type = other RNA
ttgccttcatccacaaggatt

SEQ ID NO: 402 - RNA, 21 nt, synthetic construct
  misc_feature 1..21: note = Description of origin: siRNA sense strands
  misc_feature 1..21: note = Description of source:Sense strand ID:
  modified_base 1: mod_base = OTHER; note = 2'O-methyl-guanosine
  modified_base 2: mod_base = OTHER; note = 2'O-methyl-adenosine
  modified_base 3: mod_base = OTHER; note = 2'O-methyl-uridine
  modified_base 4: mod_base = OTHER; note = 2'O-methyl-cytidine
  modified_base 5: mod_base = OTHER; note = 2'O-methyl-uridine
  modified_base 6: mod_base = OTHER; note = 2' Fluoro-cytidine
  modified_base 7: mod_base = OTHER; note = 2' Fluoro-cytidine
  modified_base 8: mod_base = OTHER; note = 2'O-methyl-adenosine
  modified_base 9: mod_base = OTHER; note = 2' Fluoro-uridine
  modified_base 10: mod_base = OTHER; note = 2' Fluoro-guanosine
  modified_base 11: mod_base = OTHER; note = 2'Fluoro-adenosine
  modified_base 12: mod_base = OTHER; note = 2' Fluoro-guanosine
  modified_base 13: mod_base = OTHER; note = 2'O-methyl-guanosine
  modified_base 14: mod_base = OTHER; note = 2'O-methyl-cytidine
  modified_base 15: mod_base = OTHER; note = 2'O-methyl-adenosine
  modified_base 16: mod_base = OTHER; note = 2'O-methyl-cytidine
  modified_base 17: mod_base = OTHER; note = 2'O-methyl-guanosine
  modified_base 18: mod_base = OTHER; note = 2'O-methyl-adenosine
  modified_base 19: mod_base = OTHER; note = 2'O-methyl-uridine
  modified_base 20: mod_base = OTHER; note = 2'O-methyl-guanosine
  modified_base 21: mod_base = OTHER; note = 2'O-methyl-guanosine
  modified_base 1..2: mod_base = OTHER; note = phosphorothioate linkage
  modified_base 2..3: mod_base = OTHER; note = phosphorothioate linkage
  source 1..21: mol_type = other RNA
gatctccatgaggcacgatgg

SEQ ID NO: 403 - RNA, 21 nt, synthetic construct
  misc_feature 1..21: note = Description of origin: siRNA sense strands
  misc_feature 1..21: note = Description of source:Sense strand ID:
  modified_base 1: mod_base = OTHER; note = 2'O-methyl-uridine
  modified_base 2: mod_base = OTHER; note = 2'O-methyl-guanosine
  modified_base 3: mod_base = OTHER; note = 2'O-methyl-cytidine
  modified_base 4: mod_base = OTHER; note = 2'O-methyl-cytidine
  modified_base 5: mod_base = OTHER; note = 2'O-methyl-uridine
  modified_base 6: mod_base = OTHER; note = 2'O-methyl-uridine
  modified_base 7: mod_base = OTHER; note = 2' Fluoro-cytidine
  modified_base 8: mod_base = OTHER; note = 2'O-methyl-adenosine
  modified_base 9: mod_base = OTHER; note = 2' Fluoro-uridine
  modified_base 10: mod_base = OTHER; note = 2' Fluoro-cytidine
  modified_base 11: mod_base = OTHER; note = 2' Fluoro-cytidine
  modified_base 12: mod_base = OTHER; note = 2'Fluoro-adenosine
  modified_base 13: mod_base = OTHER; note = 2'O-methyl-cytidine
  modified_base 14: mod_base = OTHER; note = 2'O-methyl-adenosine
  modified_base 15: mod_base = OTHER; note = 2'O-methyl-adenosine
  modified_base 16: mod_base = OTHER; note = 2'O-methyl-guanosine
  modified_base 17: mod_base = OTHER; note = 2'O-methyl-guanosine
  modified_base 18: mod_base = OTHER; note = 2'O-methyl-adenosine
  modified_base 19: mod_base = OTHER; note = 2'O-methyl-uridine
  modified_base 20: mod_base = OTHER; note = 2'O-methyl-uridine
  modified_base 21: mod_base = OTHER; note = 2'O-methyl-uridine
  modified_base 1..2: mod_base = OTHER; note = phosphorothioate linkage
  modified_base 2..3: mod_base = OTHER; note = phosphorothioate linkage
  source 1..21: mol_type = other RNA
tgccttcatccacaaggattt

SEQ ID NO: 404 - RNA, 21 nt, synthetic construct
  misc_feature 1..21: note = Description of origin: siRNA sense strands
  misc_feature 1..21: note = Description of source:Sense strand ID:
  modified_base 1: mod_base = OTHER; note = 2'O-methyl-uridine
  modified_base 2: mod_base = OTHER; note = 2'O-methyl-guanosine
  modified_base 3: mod_base = OTHER; note = 2'O-methyl-cytidine
  modified_base 4: mod_base = OTHER; note = 2'O-methyl-guanosine
  modified_base 5: mod_base = OTHER; note = 2'O-methyl-adenosine
  modified_base 6: mod_base = OTHER; note = 2'O-methyl-adenosine
  modified_base 7: mod_base = OTHER; note = 2'Fluoro-adenosine
  modified_base 8: mod_base = OTHER; note = 2'O-methyl-guanosine
  modified_base 9: mod_base = OTHER; note = 2'Fluoro-adenosine
  modified_base 10: mod_base = OTHER; note = 2' Fluoro-uridine
  modified_base 11: mod_base = OTHER; note = 2' Fluoro-cytidine
  modified_base 12: mod_base = OTHER; note = 2' Fluoro-uridine
  modified_base 13: mod_base = OTHER; note = 2'O-methyl-cytidine
  modified_base 14: mod_base = OTHER; note = 2'O-methyl-cytidine
  modified_base 15: mod_base = OTHER; note = 2'O-methyl-adenosine
  modified_base 16: mod_base = OTHER; note = 2'O-methyl-uridine
  modified_base 17: mod_base = OTHER; note = 2'O-methyl-guanosine
  modified_base 18: mod_base = OTHER; note = 2'O-methyl-adenosine
  modified_base 19: mod_base = OTHER; note = 2'O-methyl-guanosine
  modified_base 20: mod_base = OTHER; note = 2'O-methyl-guanosine
  modified_base 21: mod_base = OTHER; note = 2'O-methyl-cytidine
  modified_base 1..2: mod_base = OTHER; note = phosphorothioate linkage
  modified_base 2..3: mod_base = OTHER; note = phosphorothioate linkage
  source 1..21: mol_type = other RNA
tgcgaaagatctccatgaggc

SEQ ID NO: 405 - RNA, 21 nt, synthetic construct
  misc_feature 1..21: note = Description of origin: siRNA sense strands
  misc_feature 1..21: note = Description of source:Sense strand ID:
  modified_base 1: mod_base = OTHER; note = 2'O-methyl-guanosine
  modified_base 2: mod_base = OTHER; note = 2'O-methyl-cytidine
  modified_base 3: mod_base = OTHER; note = 2'O-methyl-uridine
  modified_base 4: mod_base = OTHER; note = 2'O-methyl-guanosine
  modified_base 5: mod_base = OTHER; note = 2'O-methyl-guanosine
  modified_base 6: mod_base = OTHER; note = 2'O-methyl-uridine
  modified_base 7: mod_base = OTHER; note = 2' Fluoro-guanosine
  modified_base 8: mod_base = OTHER; note = 2'O-methyl-guanosine
  modified_base 9: mod_base = OTHER; note = 2' Fluoro-uridine
  modified_base 10: mod_base = OTHER; note = 2' Fluoro-cytidine
  modified_base 11: mod_base = OTHER; note = 2' Fluoro-cytidine
  modified_base 12: mod_base = OTHER; note = 2' Fluoro-uridine
  modified_base 13: mod_base = OTHER; note = 2'O-methyl-cytidine
  modified_base 14: mod_base = OTHER; note = 2'O-methyl-adenosine
  modified_base 15: mod_base = OTHER; note = 2'O-methyl-uridine
  modified_base 16: mod_base = OTHER; note = 2'O-methyl-guanosine
  modified_base 17: mod_base = OTHER; note = 2'O-methyl-guanosine
  modified_base 18: mod_base = OTHER; note = 2'O-methyl-adenosine
  modified_base 19: mod_base = OTHER; note = 2'O-methyl-guanosine
  modified_base 20: mod_base = OTHER; note = 2'O-methyl-adenosine
  modified_base 21: mod_base = OTHER; note = 2'O-methyl-adenosine
  modified_base 1..2: mod_base = OTHER; note = phosphorothioate linkage
  modified_base 2..3: mod_base = OTHER; note = phosphorothioate linkage
  source 1..21: mol_type = other RNA
gctggtggtcctcatggagaa

SEQ ID NO: 406 - RNA, 21 nt, synthetic construct
  misc_feature 1..21: note = Description of origin: siRNA sense strands
  misc_feature 1..21: note = Description of source:Sense strand ID:
  modified_base 1: mod_base = OTHER; note = 2'O-methyl-guanosine
  modified_base 2: mod_base = OTHER; note = 2'O-methyl-cytidine
  modified_base 3: mod_base = OTHER; note = 2'O-methyl-guanosine
  modified_base 4: mod_base = OTHER; note = 2'O-methyl-adenosine
  modified_base 5: mod_base = OTHER; note = 2'O-methyl-adenosine
  modified_base 6: mod_base = OTHER; note = 2'O-methyl-adenosine
  modified_base 7: mod_base = OTHER; note = 2' Fluoro-guanosine
  modified_base 8: mod_base = OTHER; note = 2'O-methyl-adenosine
  modified_base 9: mod_base = OTHER; note = 2' Fluoro-uridine
  modified_base 10: mod_base = OTHER; note = 2' Fluoro-cytidine
  modified_base 11: mod_base = OTHER; note = 2' Fluoro-uridine
  modified_base 12: mod_base = OTHER; note = 2' Fluoro-cytidine
  modified_base 13: mod_base = OTHER; note = 2'O-methyl-cytidine
  modified_base 14: mod_base = OTHER; note = 2'O-methyl-adenosine
  modified_base 15: mod_base = OTHER; note = 2'O-methyl-uridine
  modified_base 16: mod_base = OTHER; note = 2'O-methyl-guanosine
  modified_base 17: mod_base = OTHER; note = 2'O-methyl-adenosine
  modified_base 18: mod_base = OTHER; note = 2'O-methyl-guanosine
  modified_base 19: mod_base = OTHER; note = 2'O-methyl-guanosine
  modified_base 20: mod_base = OTHER; note = 2'O-methyl-cytidine
  modified_base 21: mod_base = OTHER; note = 2'O-methyl-adenosine
  modified_base 1..2: mod_base = OTHER; note = phosphorothioate linkage
  modified_base 2..3: mod_base = OTHER; note = phosphorothioate linkage
  source 1..21: mol_type = other RNA
gcgaaagatctccatgaggca

SEQ ID NO: 407 - RNA, 21 nt, synthetic construct
  misc_feature 1..21: note = Description of origin: siRNA sense strands
  misc_feature 1..21: note = Description of source:Sense strand ID:
  modified_base 1: mod_base = OTHER; note = 2'O-methyl-guanosine
  modified_base 2: mod_base = OTHER; note = 2'O-methyl-uridine
  modified_base 3: mod_base = OTHER; note = 2'O-methyl-adenosine
  modified_base 4: mod_base = OTHER; note = 2'O-methyl-uridine
  modified_base 5: mod_base = OTHER; note = 2'O-methyl-guanosine
  modified_base 6: mod_base = OTHER; note = 2'O-methyl-adenosine
  modified_base 7: mod_base = OTHER; note = 2' Fluoro-guanosine
  modified_base 8: mod_base = OTHER; note = 2'O-methyl-adenosine
  modified_base 9: mod_base = OTHER; note = 2' Fluoro-uridine
  modified_base 10: mod_base = OTHER; note = 2' Fluoro-guanosine
  modified_base 11: mod_base = OTHER; note = 2' Fluoro-cytidine
  modified_base 12: mod_base = OTHER; note = 2'Fluoro-adenosine
  modified_base 13: mod_base = OTHER; note = 2'O-methyl-uridine
  modified_base 14: mod_base = OTHER; note = 2'O-methyl-guanosine
  modified_base 15: mod_base = OTHER; note = 2'O-methyl-adenosine
  modified_base 16: mod_base = OTHER; note = 2'O-methyl-guanosine
  modified_base 17: mod_base = OTHER; note = 2'O-methyl-cytidine
  modified_base 18: mod_base = OTHER; note = 2'O-methyl-uridine
  modified_base 19: mod_base = OTHER; note = 2'O-methyl-guanosine
  modified_base 20: mod_base = OTHER; note = 2'O-methyl-cytidine
  modified_base 21: mod_base = OTHER; note = 2'O-methyl-uridine
  modified_base 1..2: mod_base = OTHER; note = phosphorothioate linkage
  modified_base 2..3: mod_base = OTHER; note = phosphorothioate linkage
  source 1..21: mol_type = other RNA
gtatgagatgcatgagctgct

SEQ ID NO: 408 - RNA, 21 nt, synthetic construct
  misc_feature 1..21: note = Description of origin: siRNA sense strands
  misc_feature 1..21: note = Description of source:Sense strand ID:
  modified_base 1: mod_base = OTHER; note = 2'O-methyl-guanosine
  modified_base 2: mod_base = OTHER; note = 2'O-methyl-uridine
  modified_base 3: mod_base = OTHER; note = 2'O-methyl-uridine
  modified_base 4: mod_base = OTHER; note = 2'O-methyl-uridine
  modified_base 5: mod_base = OTHER; note = 2'O-methyl-guanosine
  modified_base 6: mod_base = OTHER; note = 2'O-methyl-adenosine
  modified_base 7: mod_base = OTHER; note = 2' Fluoro-uridine
  modified_base 8: mod_base = OTHER; note = 2'O-methyl-guanosine
  modified_base 9: mod_base = OTHER; note = 2'Fluoro-adenosine
  modified_base 10: mod_base = OTHER; note = 2' Fluoro-guanosine
  modified_base 11: mod_base = OTHER; note = 2'Fluoro-adenosine
  modified_base 12: mod_base = OTHER; note = 2' Fluoro-uridine
  modified_base 13: mod_base = OTHER; note = 2'O-methyl-uridine
  modified_base 14: mod_base = OTHER; note = 2'O-methyl-adenosine
  modified_base 15: mod_base = OTHER; note = 2'O-methyl-adenosine
  modified_base 16: mod_base = OTHER; note = 2'O-methyl-uridine
  modified_base 17: mod_base = OTHER; note = 2'O-methyl-cytidine
  modified_base 18: mod_base = OTHER; note = 2'O-methyl-cytidine
  modified_base 19: mod_base = OTHER; note = 2'O-methyl-uridine
  modified_base 20: mod_base = OTHER; note = 2'O-methyl-guanosine
  modified_base 21: mod_base = OTHER; note = 2'O-methyl-adenosine
  modified_base 1..2: mod_base = OTHER; note = phosphorothioate linkage
  modified_base 2..3: mod_base = OTHER; note = phosphorothioate linkage
  source 1..21: mol_type = other RNA
gtttgatgagattaatcctga

SEQ ID NO: 409 - RNA, 21 nt, synthetic construct
  misc_feature 1..21: note = Description of origin: siRNA sense strands
  misc_feature 1..21: note = Description of source:Sense strand ID:
  modified_base 1: mod_base = OTHER; note = 2'O-methyl-uridine
  modified_base 2: mod_base = OTHER; note = 2'O-methyl-guanosine
  modified_base 3: mod_base = OTHER; note = 2'O-methyl-adenosine
  modified_base 4: mod_base = OTHER; note = 2'O-methyl-guanosine
  modified_base 5: mod_base = OTHER; note = 2'O-methyl-adenosine
  modified_base 6: mod_base = OTHER; note = 2'O-methyl-uridine
  modified_base 7: mod_base = OTHER; note = 2' Fluoro-uridine
  modified_base 8: mod_base = OTHER; note = 2'O-methyl-adenosine
  modified_base 9: mod_base = OTHER; note = 2'Fluoro-adenosine
  modified_base 10: mod_base = OTHER; note = 2' Fluoro-uridine
  modified_base 11: mod_base = OTHER; note = 2' Fluoro-cytidine
  modified_base 12: mod_base = OTHER; note = 2' Fluoro-cytidine
  modified_base 13: mod_base = OTHER; note = 2'O-methyl-uridine
  modified_base 14: mod_base = OTHER; note = 2'O-methyl-guanosine
  modified_base 15: mod_base = OTHER; note = 2'O-methyl-adenosine
  modified_base 16: mod_base = OTHER; note = 2'O-methyl-adenosine
  modified_base 17: mod_base = OTHER; note = 2'O-methyl-adenosine
  modified_base 18: mod_base = OTHER; note = 2'O-methyl-cytidine
  modified_base 19: mod_base = OTHER; note = 2'O-methyl-cytidine
  modified_base 20: mod_base = OTHER; note = 2'O-methyl-adenosine
  modified_base 21: mod_base = OTHER; note = 2'O-methyl-adenosine
  modified_base 1..2: mod_base = OTHER; note = phosphorothioate linkage
  modified_base 2..3: mod_base = OTHER; note = phosphorothioate linkage
  source 1..21: mol_type = other RNA
tgagattaatcctgaaaccaa

SEQ ID NO: 410 - RNA, 21 nt, synthetic construct
  misc_feature 1..21: note = Description of origin: siRNA sense strands
  misc_feature 1..21: note = Description of source:Sense strand ID:
  modified_base 1: mod_base = OTHER; note = 2'O-methyl-uridine
  modified_base 2: mod_base = OTHER; note = 2'O-methyl-guanosine
  modified_base 3: mod_base = OTHER; note = 2'O-methyl-adenosine
  modified_base 4: mod_base = OTHER; note = 2'O-methyl-uridine
  modified_base 5: mod_base = OTHER; note = 2'O-methyl-guanosine
  modified_base 6: mod_base = OTHER; note = 2'O-methyl-adenosine
  modified_base 7: mod_base = OTHER; note = 2' Fluoro-guanosine
  modified_base 8: mod_base = OTHER; note = 2'O-methyl-adenosine
  modified_base 9: mod_base = OTHER; note = 2' Fluoro-uridine
  modified_base 10: mod_base = OTHER; note = 2' Fluoro-uridine
  modified_base 11: mod_base = OTHER; note = 2'Fluoro-adenosine
  modified_base 12: mod_base = OTHER; note = 2'Fluoro-adenosine
  modified_base 13: mod_base = OTHER; note = 2'O-methyl-uridine
  modified_base 14: mod_base = OTHER; note = 2'O-methyl-cytidine
  modified_base 15: mod_base = OTHER; note = 2'O-methyl-cytidine
  modified_base 16: mod_base = OTHER; note = 2'O-methyl-uridine
  modified_base 17: mod_base = OTHER; note = 2'O-methyl-guanosine
  modified_base 18: mod_base = OTHER; note = 2'O-methyl-adenosine
  modified_base 19: mod_base = OTHER; note = 2'O-methyl-adenosine
  modified_base 20: mod_base = OTHER; note = 2'O-methyl-adenosine
  modified_base 21: mod_base = OTHER; note = 2'O-methyl-cytidine
  modified_base 1..2: mod_base = OTHER; note = phosphorothioate linkage
  modified_base 2..3: mod_base = OTHER; note = phosphorothioate linkage
  source 1..21: mol_type = other RNA
tgatgagattaatcctgaaac

SEQ ID NO: 411 - RNA, 21 nt, synthetic construct
  misc_feature 1..21: note = Description of origin: siRNA sense strands
  misc_feature 1..21: note = Description of source:Sense strand ID:
  modified_base 1: mod_base = OTHER; note = 2'O-methyl-adenosine
  modified_base 2: mod_base = OTHER; note = 2'O-methyl-uridine
  modified_base 3: mod_base = OTHER; note = 2'O-methyl-guanosine
  modified_base 4: mod_base = OTHER; note = 2'O-methyl-adenosine
  modified_base 5: mod_base = OTHER; note = 2'O-methyl-guanosine
  modified_base 6: mod_base = OTHER; note = 2'O-methyl-adenosine
  modified_base 7: mod_base = OTHER; note = 2' Fluoro-uridine
  modified_base 8: mod_base = OTHER; note = 2'O-methyl-uridine
  modified_base 9: mod_base = OTHER; note = 2'Fluoro-adenosine
  modified_base 10: mod_base = OTHER; note = 2'Fluoro-adenosine
  modified_base 11: mod_base = OTHER; note = 2' Fluoro-uridine
  modified_base 12: mod_base = OTHER; note = 2' Fluoro-cytidine
  modified_base 13: mod_base = OTHER; note = 2'O-methyl-cytidine
  modified_base 14: mod_base = OTHER; note = 2'O-methyl-uridine
  modified_base 15: mod_base = OTHER; note = 2'O-methyl-guanosine
  modified_base 16: mod_base = OTHER; note = 2'O-methyl-adenosine
  modified_base 17: mod_base = OTHER; note = 2'O-methyl-adenosine
  modified_base 18: mod_base = OTHER; note = 2'O-methyl-adenosine
  modified_base 19: mod_base = OTHER; note = 2'O-methyl-cytidine
  modified_base 20: mod_base = OTHER; note = 2'O-methyl-cytidine
  modified_base 21: mod_base = OTHER; note = 2'O-methyl-adenosine
  modified_base 1..2: mod_base = OTHER; note = phosphorothioate linkage
  modified_base 2..3: mod_base = OTHER; note = phosphorothioate linkage
  source 1..21: mol_type = other RNA
atgagattaatcctgaaacca

SEQ ID NO: 412 - RNA, 21 nt, synthetic construct
  misc_feature 1..21: note = Description of origin: siRNA sense strands
  misc_feature 1..21: note = Description of source:Sense strand ID:
  modified_base 1: mod_base = OTHER; note = 2'O-methyl-guanosine
  modified_base 2: mod_base = OTHER; note = 2'O-methyl-adenosine
  modified_base 3: mod_base = OTHER; note = 2'O-methyl-uridine
  modified_base 4: mod_base = OTHER; note = 2'O-methyl-guanosine
  modified_base 5: mod_base = OTHER; note = 2'O-methyl-adenosine
  modified_base 6: mod_base = OTHER; note = 2'O-methyl-guanosine
  modified_base 7: mod_base = OTHER; note = 2'Fluoro-adenosine
  modified_base 8: mod_base = OTHER; note = 2'O-methyl-uridine
  modified_base 9: mod_base = OTHER; note = 2' Fluoro-uridine
  modified_base 10: mod_base = OTHER; note = 2'Fluoro-adenosine
  modified_base 11: mod_base = OTHER; note = 2'Fluoro-adenosine
  modified_base 12: mod_base = OTHER; note = 2' Fluoro-uridine
  modified_base 13: mod_base = OTHER; note = 2'O-methyl-cytidine
  modified_base 14: mod_base = OTHER; note = 2'O-methyl-cytidine
  modified_base 15: mod_base = OTHER; note = 2'O-methyl-uridine
  modified_base 16: mod_base = OTHER; note = 2'O-methyl-guanosine
  modified_base 17: mod_base = OTHER; note = 2'O-methyl-adenosine
  modified_base 18: mod_base = OTHER; note = 2'O-methyl-adenosine
  modified_base 19: mod_base = OTHER; note = 2'O-methyl-adenosine
  modified_base 20: mod_base = OTHER; note = 2'O-methyl-cytidine
  modified_base 21: mod_base = OTHER; note = 2'O-methyl-cytidine
  modified_base 1..2: mod_base = OTHER; note = phosphorothioate linkage
  modified_base 2..3: mod_base = OTHER; note = phosphorothioate linkage
  source 1..21: mol_type = other RNA
gatgagattaatcctgaaacc

SEQ ID NO: 413 - RNA, 21 nt, synthetic construct
  misc_feature 1..21: note = Description of origin: siRNA sense strands
  misc_feature 1..21: note = Description of source:Sense strand ID:
  modified_base 1: mod_base = OTHER; note = 2'O-methyl-cytidine
  modified_base 2: mod_base = OTHER; note = 2'O-methyl-uridine
  modified_base 3: mod_base = OTHER; note = 2'O-methyl-guanosine
  modified_base 4: mod_base = OTHER; note = 2'O-methyl-uridine
  modified_base 5: mod_base = OTHER; note = 2'O-methyl-uridine
  modified_base 6: mod_base = OTHER; note = 2'O-methyl-uridine
  modified_base 7: mod_base = OTHER; note = 2' Fluoro-guanosine
  modified_base 8: mod_base = OTHER; note = 2'O-methyl-adenosine
  modified_base 9: mod_base = OTHER; note = 2' Fluoro-uridine
  modified_base 10: mod_base = OTHER; note = 2' Fluoro-guanosine
  modified_base 11: mod_base = OTHER; note = 2'Fluoro-adenosine
  modified_base 12: mod_base = OTHER; note = 2' Fluoro-guanosine
  modified_base 13: mod_base = OTHER; note = 2'O-methyl-adenosine
  modified_base 14: mod_base = OTHER; note = 2'O-methyl-uridine
  modified_base 15: mod_base = OTHER; note = 2'O-methyl-uridine
  modified_base 16: mod_base = OTHER; note = 2'O-methyl-adenosine
  modified_base 17: mod_base = OTHER; note = 2'O-methyl-adenosine
  modified_base 18: mod_base = OTHER; note = 2'O-methyl-uridine
  modified_base 19: mod_base = OTHER; note = 2'O-methyl-cytidine
  modified_base 20: mod_base = OTHER; note = 2'O-methyl-cytidine
  modified_base 21: mod_base = OTHER; note = 2'O-methyl-uridine
  modified_base 1..2: mod_base = OTHER; note = phosphorothioate linkage
  modified_base 2..3: mod_base = OTHER; note = phosphorothioate linkage
  source 1..21: mol_type = other RNA
ctgtttgatgagattaatcct

SEQ ID NO: 414 - RNA, 21 nt, synthetic construct
  misc_feature 1..21: note = Description of origin: siRNA sense strands
  misc_feature 1..21: note = Description of source:Sense strand ID:
  modified_base 1: mod_base = OTHER; note = 2'O-methyl-uridine
  modified_base 2: mod_base = OTHER; note = 2'O-methyl-uridine
  modified_base 3: mod_base = OTHER; note = 2'O-methyl-uridine
  modified_base 4: mod_base = OTHER; note = 2'O-methyl-uridine
  modified_base 5: mod_base = OTHER; note = 2'O-methyl-guanosine
  modified_base 6: mod_base = OTHER; note = 2'O-methyl-cytidine
  modified_base 7: mod_base = OTHER; note = 2' Fluoro-cytidine
  modified_base 8: mod_base = OTHER; note = 2'O-methyl-uridine
  modified_base 9: mod_base = OTHER; note = 2' Fluoro-uridine
  modified_base 10: mod_base = OTHER; note = 2' Fluoro-cytidine
  modified_base 11: mod_base = OTHER; note = 2'Fluoro-adenosine
  modified_base 12: mod_base = OTHER; note = 2' Fluoro-uridine
  modified_base 13: mod_base = OTHER; note = 2'O-methyl-cytidine
  modified_base 14: mod_base = OTHER; note = 2'O-methyl-cytidine
  modified_base 15: mod_base = OTHER; note = 2'O-methyl-adenosine
  modified_base 16: mod_base = OTHER; note = 2'O-methyl-cytidine
  modified_base 17: mod_base = OTHER; note = 2'O-methyl-adenosine
  modified_base 18: mod_base = OTHER; note = 2'O-methyl-adenosine
  modified_base 19: mod_base = OTHER; note = 2'O-methyl-guanosine
  modified_base 20: mod_base = OTHER; note = 2'O-methyl-guanosine
  modified_base 21: mod_base = OTHER; note = 2'O-methyl-adenosine
  modified_base 1..2: mod_base = OTHER; note = phosphorothioate linkage
  modified_base 2..3: mod_base = OTHER; note = phosphorothioate linkage
  source 1..21: mol_type = other RNA
ttttgccttcatccacaagga

SEQ ID NO: 415 - RNA, 21 nt, synthetic construct
  misc_feature 1..21: note = Description of origin: siRNA sense strands
  misc_feature 1..21: note = Description of source:Sense strand ID:
  modified_base 1: mod_base = OTHER; note = 2'O-methyl-cytidine
  modified_base 2: mod_base = OTHER; note = 2'O-methyl-guanosine
  modified_base 3: mod_base = OTHER; note = 2'O-methyl-adenosine
  modified_base 4: mod_base = OTHER; note = 2'O-methyl-adenosine
  modified_base 5: mod_base = OTHER; note = 2'O-methyl-adenosine
  modified_base 6: mod_base = OTHER; note = 2'O-methyl-guanosine
  modified_base 7: mod_base = OTHER; note = 2'Fluoro-adenosine
  modified_base 8: mod_base = OTHER; note = 2'O-methyl-uridine
  modified_base 9: mod_base = OTHER; note = 2' Fluoro-cytidine
  modified_base 10: mod_base = OTHER; note = 2' Fluoro-uridine
  modified_base 11: mod_base = OTHER; note = 2' Fluoro-cytidine
  modified_base 12: mod_base = OTHER; note = 2' Fluoro-cytidine
  modified_base 13: mod_base = OTHER; note = 2'O-methyl-adenosine
  modified_base 14: mod_base = OTHER; note = 2'O-methyl-uridine
  modified_base 15: mod_base = OTHER; note = 2'O-methyl-guanosine
  modified_base 16: mod_base = OTHER; note = 2'O-methyl-adenosine
  modified_base 17: mod_base = OTHER; note = 2'O-methyl-guanosine
  modified_base 18: mod_base = OTHER; note = 2'O-methyl-guanosine
  modified_base 19: mod_base = OTHER; note = 2'O-methyl-cytidine
  modified_base 20: mod_base = OTHER; note = 2'O-methyl-adenosine
  modified_base 21: mod_base = OTHER; note = 2'O-methyl-cytidine
  modified_base 1..2: mod_base = OTHER; note = phosphorothioate linkage
  modified_base 2..3: mod_base = OTHER; note = phosphorothioate linkage
  source 1..21: mol_type = other RNA
cgaaagatctccatgaggcac

SEQ ID NO: 416 - RNA, 21 nt, synthetic construct
  misc_feature 1..21: note = Description of origin: siRNA sense strands
  misc_feature 1..21: note = Description of source:Sense strand ID:
  modified_base 1: mod_base = OTHER; note = 2'O-methyl-uridine
  modified_base 2: mod_base = OTHER; note = 2'O-methyl-guanosine
  modified_base 3: mod_base = OTHER; note = 2'O-methyl-cytidine
  modified_base 4: mod_base = OTHER; note = 2'O-methyl-uridine
  modified_base 5: mod_base = OTHER; note = 2'O-methyl-guanosine
  modified_base 6: mod_base = OTHER; note = 2'O-methyl-guanosine
  modified_base 7: mod_base = OTHER; note = 2' Fluoro-uridine
  modified_base 8: mod_base = OTHER; note = 2'O-methyl-guanosine
  modified_base 9: mod_base = OTHER; note = 2' Fluoro-guanosine
  modified_base 10: mod_base = OTHER; note = 2' Fluoro-uridine
  modified_base 11: mod_base = OTHER; note = 2' Fluoro-cytidine
  modified_base 12: mod_base = OTHER; note = 2' Fluoro-cytidine
  modified_base 13: mod_base = OTHER; note = 2'O-methyl-uridine
  modified_base 14: mod_base = OTHER; note = 2'O-methyl-cytidine
  modified_base 15: mod_base = OTHER; note = 2'O-methyl-adenosine
  modified_base 16: mod_base = OTHER; note = 2'O-methyl-uridine
  modified_base 17: mod_base = OTHER; note = 2'O-methyl-guanosine
  modified_base 18: mod_base = OTHER; note = 2'O-methyl-guanosine
  modified_base 19: mod_base = OTHER; note = 2'O-methyl-adenosine
  modified_base 20: mod_base = OTHER; note = 2'O-methyl-guanosine
  modified_base 21: mod_base = OTHER; note = 2'O-methyl-adenosine
  modified_base 1..2: mod_base = OTHER; note = phosphorothioate linkage
  modified_base 2..3: mod_base = OTHER; note = phosphorothioate linkage
  source 1..21: mol_type = other RNA
tgctggtggtcctcatggaga

SEQ ID NO: 417 - RNA, 21 nt, synthetic construct
  misc_feature 1..21: note = Description of origin: siRNA sense strands
  misc_feature 1..21: note = Description of source:Sense strand ID:
  modified_base 1: mod_base = OTHER; note = 2'O-methyl-cytidine
  modified_base 2: mod_base = OTHER; note = 2'O-methyl-cytidine
  modified_base 3: mod_base = OTHER; note = 2'O-methyl-uridine
  modified_base 4: mod_base = OTHER; note = 2'O-methyl-uridine
  modified_base 5: mod_base = OTHER; note = 2'O-methyl-cytidine
  modified_base 6: mod_base = OTHER; note = 2'O-methyl-adenosine
  modified_base 7: mod_base = OTHER; note = 2' Fluoro-uridine
  modified_base 8: mod_base = OTHER; note = 2'O-methyl-cytidine
  modified_base 9: mod_base = OTHER; note = 2' Fluoro-cytidine
  modified_base 10: mod_base = OTHER; note = 2'Fluoro-adenosine
  modified_base 11: mod_base = OTHER; note = 2' Fluoro-cytidine
  modified_base 12: mod_base = OTHER; note = 2'Fluoro-adenosine
  modified_base 13: mod_base = OTHER; note = 2'O-methyl-adenosine
  modified_base 14: mod_base = OTHER; note = 2'O-methyl-guanosine
  modified_base 15: mod_base = OTHER; note = 2'O-methyl-guanosine
  modified_base 16: mod_base = OTHER; note = 2'O-methyl-adenosine
  modified_base 17: mod_base = OTHER; note = 2'O-methyl-uridine
  modified_base 18: mod_base = OTHER; note = 2'O-methyl-uridine
  modified_base 19: mod_base = OTHER; note = 2'O-methyl-uridine
  modified_base 20: mod_base = OTHER; note = 2'O-methyl-uridine
  modified_base 21: mod_base = OTHER; note = 2'O-methyl-guanosine
  modified_base 1..2: mod_base = OTHER; note = phosphorothioate linkage
  modified_base 2..3: mod_base = OTHER; note = phosphorothioate linkage
  source 1..21: mol_type = other RNA
ccttcatccacaaggattttg

SEQ ID NO: 418 - RNA, 21 nt, synthetic construct
  misc_feature 1..21: note = Description of origin: siRNA sense strands
  misc_feature 1..21: note = Description of source:Sense strand ID:
  modified_base 1: mod_base = OTHER; note = 2'O-methyl-guanosine
  modified_base 2: mod_base = OTHER; note = 2'O-methyl-adenosine
  modified_base 3: mod_base = OTHER; note = 2'O-methyl-adenosine
  modified_base 4: mod_base = OTHER; note = 2'O-methyl-adenosine
  modified_base 5: mod_base = OTHER; note = 2'O-methyl-guanosine
  modified_base 6: mod_base = OTHER; note = 2'O-methyl-adenosine
  modified_base 7: mod_base = OTHER; note = 2' Fluoro-uridine
  modified_base 8: mod_base = OTHER; note = 2'O-methyl-cytidine
  modified_base 9: mod_base = OTHER; note = 2' Fluoro-uridine
  modified_base 10: mod_base = OTHER; note = 2' Fluoro-cytidine
  modified_base 11: mod_base = OTHER; note = 2' Fluoro-cytidine
  modified_base 12: mod_base = OTHER; note = 2'Fluoro-adenosine
  modified_base 13: mod_base = OTHER; note = 2'O-methyl-uridine
  modified_base 14: mod_base = OTHER; note = 2'O-methyl-guanosine
  modified_base 15: mod_base = OTHER; note = 2'O-methyl-adenosine
  modified_base 16: mod_base = OTHER; note = 2'O-methyl-guanosine
  modified_base 17: mod_base = OTHER; note = 2'O-methyl-guanosine
  modified_base 18: mod_base = OTHER; note = 2'O-methyl-cytidine
  modified_base 19: mod_base = OTHER; note = 2'O-methyl-adenosine
  modified_base 20: mod_base = OTHER; note = 2'O-methyl-cytidine
  modified_base 21: mod_base = OTHER; note = 2'O-methyl-guanosine
  modified_base 1..2: mod_base = OTHER; note = phosphorothioate linkage
  modified_base 2..3: mod_base = OTHER; note = phosphorothioate linkage
  source 1..21: mol_type = other RNA
gaaagatctccatgaggcacg

SEQ ID NO: 419 - RNA, 21 nt, synthetic construct
  misc_feature 1..21: note = Description of origin: siRNA sense strands
  misc_feature 1..21: note = Description of source:Sense strand ID:
  modified_base 1: mod_base = OTHER; note = 2'O-methyl-uridine
  modified_base 2: mod_base = OTHER; note = 2'O-methyl-uridine
  modified_base 3: mod_base = OTHER; note = 2'O-methyl-cytidine
  modified_base 4: mod_base = OTHER; note = 2'O-methyl-adenosine
  modified_base 5: mod_base = OTHER; note = 2'O-methyl-uridine
  modified_base 6: mod_base = OTHER; note = 2'O-methyl-cytidine
  modified_base 7: mod_base = OTHER; note = 2' Fluoro-cytidine
  modified_base 8: mod_base = OTHER; note = 2'O-methyl-adenosine
  modified_base 9: mod_base = OTHER; note = 2' Fluoro-cytidine
  modified_base 10: mod_base = OTHER; note = 2'Fluoro-adenosine
  modified_base 11: mod_base = OTHER; note = 2'Fluoro-adenosine
  modified_base 12: mod_base = OTHER; note = 2' Fluoro-guanosine
  modified_base 13: mod_base = OTHER; note = 2'O-methyl-guanosine
  modified_base 14: mod_base = OTHER; note = 2'O-methyl-adenosine
  modified_base 15: mod_base = OTHER; note = 2'O-methyl-uridine
  modified_base 16: mod_base = OTHER; note = 2'O-methyl-uridine
  modified_base 17: mod_base = OTHER; note = 2'O-methyl-uridine
  modified_base 18: mod_base = OTHER; note = 2'O-methyl-uridine
  modified_base 19: mod_base = OTHER; note = 2'O-methyl-guanosine
  modified_base 20: mod_base = OTHER; note = 2'O-methyl-adenosine
  modified_base 21: mod_base = OTHER; note = 2'O-methyl-uridine
  modified_base 1..2: mod_base = OTHER; note = phosphorothioate linkage
  modified_base 2..3: mod_base = OTHER; note = phosphorothioate linkage
  source 1..21: mol_type = other RNA
ttcatccacaaggattttgat

SEQ ID NO: 420 - RNA, 21 nt, synthetic construct
  misc_feature 1..21: note = Description of origin: siRNA sense strands
  misc_feature 1..21: note = Description of source:Sense strand ID:
  modified_base 1: mod_base = OTHER; note = 2'O-methyl-uridine
  modified_base 2: mod_base = OTHER; note = 2'O-methyl-uridine
  modified_base 3: mod_base = OTHER; note = 2'O-methyl-uridine
  modified_base 4: mod_base = OTHER; note = 2'O-methyl-guanosine
  modified_base 5: mod_base = OTHER; note = 2'O-methyl-adenosine
  modified_base 6: mod_base = OTHER; note = 2'O-methyl-uridine
  modified_base 7: mod_base = OTHER; note = 2' Fluoro-guanosine
  modified_base 8: mod_base = OTHER; note = 2'O-methyl-adenosine
  modified_base 9: mod_base = OTHER; note = 2' Fluoro-guanosine
  modified_base 10: mod_base = OTHER; note = 2'Fluoro-adenosine
  modified_base 11: mod_base = OTHER; note = 2' Fluoro-uridine
  modified_base 12: mod_base = OTHER; note = 2' Fluoro-uridine
  modified_base 13: mod_base = OTHER; note = 2'O-methyl-adenosine
  modified_base 14: mod_base = OTHER; note = 2'O-methyl-adenosine
  modified_base 15: mod_base = OTHER; note = 2'O-methyl-uridine
  modified_base 16: mod_base = OTHER; note = 2'O-methyl-cytidine
  modified_base 17: mod_base = OTHER; note = 2'O-methyl-cytidine
  modified_base 18: mod_base = OTHER; note = 2'O-methyl-uridine
  modified_base 19: mod_base = OTHER; note = 2'O-methyl-guanosine
  modified_base 20: mod_base = OTHER; note = 2'O-methyl-adenosine
  modified_base 21: mod_base = OTHER; note = 2'O-methyl-adenosine
  modified_base 1..2: mod_base = OTHER; note = phosphorothioate linkage
  modified_base 2..3: mod_base = OTHER; note = phosphorothioate linkage
  source 1..21: mol_type = other RNA
tttgatgagattaatcctgaa

SEQ ID NO: 421 - RNA, 21 nt, synthetic construct
  misc_feature 1..21: note = Description of origin: siRNA sense strands
  misc_feature 1..21: note = Description of source:Sense strand ID:
  modified_base 1: mod_base = OTHER; note = 2'O-methyl-uridine
  modified_base 2: mod_base = OTHER; note = 2'O-methyl-uridine
  modified_base 3: mod_base = OTHER; note = 2'O-methyl-guanosine
  modified_base 4: mod_base = OTHER; note = 2'O-methyl-cytidine
  modified_base 5: mod_base = OTHER; note = 2'O-methyl-cytidine
  modified_base 6: mod_base = OTHER; note = 2'O-methyl-uridine
  modified_base 7: mod_base = OTHER; note = 2' Fluoro-uridine
  modified_base 8: mod_base = OTHER; note = 2'O-methyl-cytidine
  modified_base 9: mod_base = OTHER; note = 2'Fluoro-adenosine
  modified_base 10: mod_base = OTHER; note = 2' Fluoro-uridine
  modified_base 11: mod_base = OTHER; note = 2' Fluoro-cytidine
  modified_base 12: mod_base = OTHER; note = 2' Fluoro-cytidine
  modified_base 13: mod_base = OTHER; note = 2'O-methyl-adenosine
  modified_base 14: mod_base = OTHER; note = 2'O-methyl-cytidine
  modified_base 15: mod_base = OTHER; note = 2'O-methyl-adenosine
  modified_base 16: mod_base = OTHER; note = 2'O-methyl-adenosine
  modified_base 17: mod_base = OTHER; note = 2'O-methyl-guanosine
  modified_base 18: mod_base = OTHER; note = 2'O-methyl-guanosine
  modified_base 19: mod_base = OTHER; note = 2'O-methyl-adenosine
  modified_base 20: mod_base = OTHER; note = 2'O-methyl-uridine
  modified_base 21: mod_base = OTHER; note = 2'O-methyl-uridine
  modified_base 1..2: mod_base = OTHER; note = phosphorothioate linkage
  modified_base 2..3: mod_base = OTHER; note = phosphorothioate linkage
  source 1..21: mol_type = other RNA
ttgccttcatccacaaggatt

SEQ ID NO: 422 - RNA, 21 nt, synthetic construct
  misc_feature 1..21: note = Description of origin: siRNA sense strands
  misc_feature 1..21: note = Description of source:Sense strand ID:
  modified_base 1: mod_base = OTHER; note = 2'O-methyl-guanosine
  modified_base 2: mod_base = OTHER; note = 2'O-methyl-adenosine
  modified_base 3: mod_base = OTHER; note = 2'O-methyl-uridine
  modified_base 4: mod_base = OTHER; note = 2'O-methyl-cytidine
  modified_base 5: mod_base = OTHER; note = 2'O-methyl-uridine
  modified_base 6: mod_base = OTHER; note = 2'O-methyl-cytidine
  modified_base 7: mod_base = OTHER; note = 2' Fluoro-cytidine
  modified_base 8: mod_base = OTHER; note = 2'O-methyl-adenosine
  modified_base 9: mod_base = OTHER; note = 2' Fluoro-uridine
  modified_base 10: mod_base = OTHER; note = 2' Fluoro-guanosine
  modified_base 11: mod_base = OTHER; note = 2'Fluoro-adenosine
  modified_base 12: mod_base = OTHER; note = 2' Fluoro-guanosine
  modified_base 13: mod_base = OTHER; note = 2'O-methyl-guanosine
  modified_base 14: mod_base = OTHER; note = 2'O-methyl-cytidine
  modified_base 15: mod_base = OTHER; note = 2'O-methyl-adenosine
  modified_base 16: mod_base = OTHER; note = 2'O-methyl-cytidine
  modified_base 17: mod_base = OTHER; note = 2'O-methyl-guanosine
  modified_base 18: mod_base = OTHER; note = 2'O-methyl-adenosine
  modified_base 19: mod_base = OTHER; note = 2'O-methyl-uridine
  modified_base 20: mod_base = OTHER; note = 2'O-methyl-guanosine
  modified_base 21: mod_base = OTHER; note = 2'O-methyl-guanosine
  modified_base 1..2: mod_base = OTHER; note = phosphorothioate linkage
  modified_base 2..3: mod_base = OTHER; note = phosphorothioate linkage
  source 1..21: mol_type = other RNA
gatctccatgaggcacgatgg

SEQ ID NO: 423 - RNA, 21 nt, synthetic construct
  misc_feature 1..21: note = Description of origin: siRNA sense strands
  misc_feature 1..21: note = Description of source:Sense strand ID:
  modified_base 1: mod_base = OTHER; note = 2'O-methyl-uridine
  modified_base 2: mod_base = OTHER; note = 2'O-methyl-guanosine
  modified_base 3: mod_base = OTHER; note = 2'O-methyl-cytidine
  modified_base 4: mod_base = OTHER; note = 2'O-methyl-cytidine
  modified_base 5: mod_base = OTHER; note = 2'O-methyl-uridine
  modified_base 6: mod_base = OTHER; note = 2'O-methyl-uridine
  modified_base 7: mod_base = OTHER; note = 2' Fluoro-cytidine
  modified_base 8: mod_base = OTHER; note = 2'O-methyl-adenosine
  modified_base 9: mod_base = OTHER; note = 2' Fluoro-uridine
  modified_base 10: mod_base = OTHER; note = 2' Fluoro-cytidine
  modified_base 11: mod_base = OTHER; note = 2' Fluoro-cytidine
  modified_base 12: mod_base = OTHER; note = 2'Fluoro-adenosine
  modified_base 13: mod_base = OTHER; note = 2'O-methyl-cytidine
  modified_base 14: mod_base = OTHER; note = 2'O-methyl-adenosine
  modified_base 15: mod_base = OTHER; note = 2'O-methyl-adenosine
  modified_base 16: mod_base = OTHER; note = 2'O-methyl-guanosine
  modified_base 17: mod_base = OTHER; note = 2'O-methyl-guanosine
  modified_base 18: mod_base = OTHER; note = 2'O-methyl-adenosine
  modified_base 19: mod_base = OTHER; note = 2'O-methyl-uridine
  modified_base 20: mod_base = OTHER; note = 2'O-methyl-uridine
  modified_base 21: mod_base = OTHER; note = 2'O-methyl-uridine
  modified_base 1..2: mod_base = OTHER; note = phosphorothioate linkage
  modified_base 2..3: mod_base = OTHER; note = phosphorothioate linkage
  source 1..21: mol_type = other RNA
tgccttcatccacaaggattt

SEQ ID NO: 424 - RNA, 21 nt, synthetic construct
  misc_feature 1..21: note = Description of origin: siRNA sense strands
  misc_feature 1..21: note = Description of source:Sense strand ID:
  modified_base 1: mod_base = OTHER; note = 2'O-methyl-uridine
  modified_base 2: mod_base = OTHER; note = 2'O-methyl-guanosine
  modified_base 3: mod_base = OTHER; note = 2'O-methyl-cytidine
  modified_base 4: mod_base = OTHER; note = 2'O-methyl-guanosine
  modified_base 5: mod_base = OTHER; note = 2'O-methyl-adenosine
  modified_base 6: mod_base = OTHER; note = 2'O-methyl-adenosine
  modified_base 7: mod_base = OTHER; note = 2'Fluoro-adenosine
  modified_base 8: mod_base = OTHER; note = 2'O-methyl-guanosine
  modified_base 9: mod_base = OTHER; note = 2'Fluoro-adenosine
  modified_base 10: mod_base = OTHER; note = 2' Fluoro-uridine
  modified_base 11: mod_base = OTHER; note = 2' Fluoro-cytidine
  modified_base 12: mod_base = OTHER; note = 2' Fluoro-uridine
  modified_base 13: mod_base = OTHER; note = 2'O-methyl-cytidine
  modified_base 14: mod_base = OTHER; note = 2'O-methyl-cytidine
  modified_base 15: mod_base = OTHER; note = 2'O-methyl-adenosine
  modified_base 16: mod_base = OTHER; note = 2'O-methyl-uridine
  modified_base 17: mod_base = OTHER; note = 2'O-methyl-guanosine
  modified_base 18: mod_base = OTHER; note = 2'O-methyl-adenosine
  modified_base 19: mod_base = OTHER; note = 2'O-methyl-guanosine
  modified_base 20: mod_base = OTHER; note = 2'O-methyl-guanosine
  modified_base 21: mod_base = OTHER; note = 2'O-methyl-cytidine
  modified_base 1..2: mod_base = OTHER; note = phosphorothioate linkage
  modified_base 2..3: mod_base = OTHER; note = phosphorothioate linkage
  source 1..21: mol_type = other RNA
tgcgaaagatctccatgaggc

SEQ ID NO: 425 - RNA, 21 nt, synthetic construct
  misc_feature 1..21: note = Description of origin: siRNA sense strands
  misc_feature 1..21: note = Description of source:Sense strand ID:
  modified_base 1: mod_base = OTHER; note = 2'O-methyl-guanosine
  modified_base 2: mod_base = OTHER; note = 2'O-methyl-cytidine
  modified_base 3: mod_base = OTHER; note = 2'O-methyl-uridine
  modified_base 4: mod_base = OTHER; note = 2'O-methyl-guanosine
  modified_base 5: mod_base = OTHER; note = 2'O-methyl-guanosine
  modified_base 6: mod_base = OTHER; note = 2'O-methyl-uridine
  modified_base 7: mod_base = OTHER; note = 2' Fluoro-guanosine
  modified_base 8: mod_base = OTHER; note = 2'O-methyl-guanosine
  modified_base 9: mod_base = OTHER; note = 2' Fluoro-uridine
  modified_base 10: mod_base = OTHER; note = 2' Fluoro-cytidine
  modified_base 11: mod_base = OTHER; note = 2' Fluoro-cytidine
  modified_base 12: mod_base = OTHER; note = 2' Fluoro-uridine
  modified_base 13: mod_base = OTHER; note = 2'O-methyl-cytidine
  modified_base 14: mod_base = OTHER; note = 2'O-methyl-adenosine
  modified_base 15: mod_base = OTHER; note = 2'O-methyl-uridine
  modified_base 16: mod_base = OTHER; note = 2'O-methyl-guanosine
  modified_base 17: mod_base = OTHER; note = 2'O-methyl-guanosine
  modified_base 18: mod_base = OTHER; note = 2'O-methyl-adenosine
  modified_base 19: mod_base = OTHER; note = 2'O-methyl-guanosine
  modified_base 20: mod_base = OTHER; note = 2'O-methyl-adenosine
  modified_base 21: mod_base = OTHER; note = 2'O-methyl-adenosine
  modified_base 1..2: mod_base = OTHER; note = phosphorothioate linkage
  modified_base 2..3: mod_base = OTHER; note = phosphorothioate linkage
  source 1..21: mol_type = other RNA
gctggtggtcctcatggagaa

SEQ ID NO: 426 - RNA, 21 nt, synthetic construct
  misc_feature 1..21: note = Description of origin: siRNA sense strands
  misc_feature 1..21: note = Description of source:Sense strand ID:
  modified_base 1: mod_base = OTHER; note = 2'O-methyl-guanosine
  modified_base 2: mod_base = OTHER; note = 2'O-methyl-cytidine
  modified_base 3: mod_base = OTHER; note = 2'O-methyl-guanosine
  modified_base 4: mod_base = OTHER; note = 2'O-methyl-adenosine
  modified_base 5: mod_base = OTHER; note = 2'O-methyl-adenosine
  modified_base 6: mod_base = OTHER; note = 2'O-methyl-adenosine
  modified_base 7: mod_base = OTHER; note = 2' Fluoro-guanosine
  modified_base 8: mod_base = OTHER; note = 2'O-methyl-adenosine
  modified_base 9: mod_base = OTHER; note = 2' Fluoro-uridine
  modified_base 10: mod_base = OTHER; note = 2' Fluoro-cytidine
  modified_base 11: mod_base = OTHER; note = 2' Fluoro-uridine
  modified_base 12: mod_base = OTHER; note = 2' Fluoro-cytidine
  modified_base 13: mod_base = OTHER; note = 2'O-methyl-cytidine
  modified_base 14: mod_base = OTHER; note = 2'O-methyl-adenosine
  modified_base 15: mod_base = OTHER; note = 2'O-methyl-uridine
  modified_base 16: mod_base = OTHER; note = 2'O-methyl-guanosine
  modified_base 17: mod_base = OTHER; note = 2'O-methyl-adenosine
  modified_base 18: mod_base = OTHER; note = 2'O-methyl-guanosine
  modified_base 19: mod_base = OTHER; note = 2'O-methyl-guanosine
  modified_base 20: mod_base = OTHER; note = 2'O-methyl-cytidine
  modified_base 21: mod_base = OTHER; note = 2'O-methyl-adenosine
  modified_base 1..2: mod_base = OTHER; note = phosphorothioate linkage
  modified_base 2..3: mod_base = OTHER; note = phosphorothioate linkage
  source 1..21: mol_type = other RNA
gcgaaagatctccatgaggca

SEQ ID NO: 427 - RNA, 21 nt, synthetic construct
  misc_feature 1..21: note = Description of origin: siRNA sense strands
  misc_feature 1..21: note = Description of source:Sense strand ID:
  modified_base 1: mod_base = OTHER; note = 2'O-methyl-guanosine
  modified_base 2: mod_base = OTHER; note = 2'O-methyl-uridine
  modified_base 3: mod_base = OTHER; note = 2'O-methyl-adenosine
  modified_base 4: mod_base = OTHER; note = 2'O-methyl-uridine
  modified_base 5: mod_base = OTHER; note = 2'O-methyl-guanosine
  modified_base 6: mod_base = OTHER; note = 2'O-methyl-adenosine
  modified_base 7: mod_base = OTHER; note = 2' Fluoro-guanosine
  modified_base 8: mod_base = OTHER; note = 2'O-methyl-adenosine
  modified_base 9: mod_base = OTHER; note = 2' Fluoro-uridine
  modified_base 10: mod_base = OTHER; note = 2' Fluoro-guanosine
  modified_base 11: mod_base = OTHER; note = 2' Fluoro-cytidine
  modified_base 12: mod_base = OTHER; note = 2'Fluoro-adenosine
  modified_base 13: mod_base = OTHER; note = 2'O-methyl-uridine
  modified_base 14: mod_base = OTHER; note = 2'O-methyl-guanosine
  modified_base 15: mod_base = OTHER; note = 2'O-methyl-adenosine
  modified_base 16: mod_base = OTHER; note = 2'O-methyl-guanosine
  modified_base 17: mod_base = OTHER; note = 2'O-methyl-cytidine
  modified_base 18: mod_base = OTHER; note = 2'O-methyl-uridine
  modified_base 19: mod_base = OTHER; note = 2'O-methyl-guanosine
  modified_base 20: mod_base = OTHER; note = 2'O-methyl-cytidine
  modified_base 21: mod_base = OTHER; note = 2'O-methyl-uridine
  modified_base 1..2: mod_base = OTHER; note = phosphorothioate linkage
  modified_base 2..3: mod_base = OTHER; note = phosphorothioate linkage
  source 1..21: mol_type = other RNA
gtatgagatgcatgagctgct

SEQ ID NO: 428 - RNA, 21 nt, synthetic construct
  misc_feature 1..21: note = Description of origin: siRNA sense strands
  misc_feature 1..21: note = Description of source:Sense strand ID:
  modified_base 1: mod_base = OTHER; note = 2'O-methyl-guanosine
  modified_base 2: mod_base = OTHER; note = 2'O-methyl-uridine
  modified_base 3: mod_base = OTHER; note = 2'O-methyl-uridine
  modified_base 4: mod_base = OTHER; note = 2'O-methyl-uridine
  modified_base 5: mod_base = OTHER; note = 2'O-methyl-guanosine
  modified_base 6: mod_base = OTHER; note = 2'O-methyl-adenosine
  modified_base 7: mod_base = OTHER; note = 2' Fluoro-uridine
  modified_base 8: mod_base = OTHER; note = 2'O-methyl-guanosine
  modified_base 9: mod_base = OTHER; note = 2'Fluoro-adenosine
  modified_base 10: mod_base = OTHER; note = 2' Fluoro-guanosine
  modified_base 11: mod_base = OTHER; note = 2'Fluoro-adenosine
  modified_base 12: mod_base = OTHER; note = 2' Fluoro-uridine
  modified_base 13: mod_base = OTHER; note = 2'O-methyl-uridine
  modified_base 14: mod_base = OTHER; note = 2'O-methyl-adenosine
  modified_base 15: mod_base = OTHER; note = 2'O-methyl-adenosine
  modified_base 16: mod_base = OTHER; note = 2'O-methyl-uridine
  modified_base 17: mod_base = OTHER; note = 2'O-methyl-cytidine
  modified_base 18: mod_base = OTHER; note = 2'O-methyl-cytidine
  modified_base 19: mod_base = OTHER; note = 2'O-methyl-uridine
  modified_base 20: mod_base = OTHER; note = 2'O-methyl-guanosine
  modified_base 21: mod_base = OTHER; note = 2'O-methyl-adenosine
  modified_base 1..2: mod_base = OTHER; note = phosphorothioate linkage
  modified_base 2..3: mod_base = OTHER; note = phosphorothioate linkage
  source 1..21: mol_type = other RNA
gtttgatgagattaatcctga

SEQ ID NO: 429 - RNA, 21 nt, synthetic construct
  misc_feature 1..21: note = Description of origin: siRNA sense strands
  misc_feature 1..21: note = Description of source:Sense strand ID:
  modified_base 1: mod_base = OTHER; note = 2'O-methyl-uridine
  modified_base 2: mod_base = OTHER; note = 2'O-methyl-guanosine
  modified_base 3: mod_base = OTHER; note = 2'O-methyl-adenosine
  modified_base 4: mod_base = OTHER; note = 2'O-methyl-guanosine
  modified_base 5: mod_base = OTHER; note = 2'O-methyl-adenosine
  modified_base 6: mod_base = OTHER; note = 2'O-methyl-uridine
  modified_base 7: mod_base = OTHER; note = 2' Fluoro-uridine
  modified_base 8: mod_base = OTHER; note = 2'O-methyl-adenosine
  modified_base 9: mod_base = OTHER; note = 2'Fluoro-adenosine
  modified_base 10: mod_base = OTHER; note = 2' Fluoro-uridine
  modified_base 11: mod_base = OTHER; note = 2' Fluoro-cytidine
  modified_base 12: mod_base = OTHER; note = 2' Fluoro-cytidine
  modified_base 13: mod_base = OTHER; note = 2'O-methyl-uridine
  modified_base 14: mod_base = OTHER; note = 2'O-methyl-guanosine
  modified_base 15: mod_base = OTHER; note = 2'O-methyl-adenosine
  modified_base 16: mod_base = OTHER; note = 2'O-methyl-adenosine
  modified_base 17: mod_base = OTHER; note = 2'O-methyl-adenosine
  modified_base 18: mod_base = OTHER; note = 2'O-methyl-cytidine
  modified_base 19: mod_base = OTHER; note = 2'O-methyl-cytidine
  modified_base 20: mod_base = OTHER; note = 2'O-methyl-adenosine
  modified_base 21: mod_base = OTHER; note = 2'O-methyl-adenosine
  modified_base 1..2: mod_base = OTHER; note = phosphorothioate linkage
  modified_base 2..3: mod_base = OTHER; note = phosphorothioate linkage
  source 1..21: mol_type = other RNA
tgagattaatcctgaaaccaa

SEQ ID NO: 430 - RNA, 21 nt, synthetic construct
  misc_feature 1..21: note = Description of origin: siRNA sense strands
  misc_feature 1..21: note = Description of source:Sense strand ID:
  modified_base 1: mod_base = OTHER; note = 2'O-methyl-uridine
  modified_base 2: mod_base = OTHER; note = 2'O-methyl-guanosine
  modified_base 3: mod_base = OTHER; note = 2'O-methyl-adenosine
  modified_base 4: mod_base = OTHER; note = 2'O-methyl-uridine
  modified_base 5: mod_base = OTHER; note = 2'O-methyl-guanosine
  modified_base 6: mod_base = OTHER; note = 2'O-methyl-adenosine
  modified_base 7: mod_base = OTHER; note = 2' Fluoro-guanosine
  modified_base 8: mod_base = OTHER; note = 2'O-methyl-adenosine
  modified_base 9: mod_base = OTHER; note = 2' Fluoro-uridine
  modified_base 10: mod_base = OTHER; note = 2' Fluoro-uridine
  modified_base 11: mod_base = OTHER; note = 2'Fluoro-adenosine
  modified_base 12: mod_base = OTHER; note = 2'Fluoro-adenosine
  modified_base 13: mod_base = OTHER; note = 2'O-methyl-uridine
  modified_base 14: mod_base = OTHER; note = 2'O-methyl-cytidine
  modified_base 15: mod_base = OTHER; note = 2'O-methyl-cytidine
  modified_base 16: mod_base = OTHER; note = 2'O-methyl-uridine
  modified_base 17: mod_base = OTHER; note = 2'O-methyl-guanosine
  modified_base 18: mod_base = OTHER; note = 2'O-methyl-adenosine
  modified_base 19: mod_base = OTHER; note = 2'O-methyl-adenosine
  modified_base 20: mod_base = OTHER; note = 2'O-methyl-adenosine
  modified_base 21: mod_base = OTHER; note = 2'O-methyl-cytidine
  modified_base 1..2: mod_base = OTHER; note = phosphorothioate linkage
  modified_base 2..3: mod_base = OTHER; note = phosphorothioate linkage
  source 1..21: mol_type = other RNA
tgatgagattaatcctgaaac

SEQ ID NO: 431 - RNA, 21 nt, synthetic construct
  misc_feature 1..21: note = Description of origin: siRNA sense strands
  misc_feature 1..21: note = Description of source:Sense strand ID:
  modified_base 1: mod_base = OTHER; note = 2'O-methyl-adenosine
  modified_base 2: mod_base = OTHER; note = 2'O-methyl-uridine
  modified_base 3: mod_base = OTHER; note = 2'O-methyl-guanosine
  modified_base 4: mod_base = OTHER; note = 2'O-methyl-adenosine
  modified_base 5: mod_base = OTHER; note = 2'O-methyl-guanosine
  modified_base 6: mod_base = OTHER; note = 2'O-methyl-adenosine
  modified_base 7: mod_base = OTHER; note = 2' Fluoro-uridine
  modified_base 8: mod_base = OTHER; note = 2'O-methyl-uridine
  modified_base 9: mod_base = OTHER; note = 2'Fluoro-adenosine
  modified_base 10: mod_base = OTHER; note = 2'Fluoro-adenosine
  modified_base 11: mod_base = OTHER; note = 2' Fluoro-uridine
  modified_base 12: mod_base = OTHER; note = 2' Fluoro-cytidine
  modified_base 13: mod_base = OTHER; note = 2'O-methyl-cytidine
  modified_base 14: mod_base = OTHER; note = 2'O-methyl-uridine
  modified_base 15: mod_base = OTHER; note = 2'O-methyl-guanosine
  modified_base 16: mod_base = OTHER; note = 2'O-methyl-adenosine
  modified_base 17: mod_base = OTHER; note = 2'O-methyl-adenosine
  modified_base 18: mod_base = OTHER; note = 2'O-methyl-adenosine
  modified_base 19: mod_base = OTHER; note = 2'O-methyl-cytidine
  modified_base 20: mod_base = OTHER; note = 2'O-methyl-cytidine
  modified_base 21: mod_base = OTHER; note = 2'O-methyl-adenosine
  modified_base 1..2: mod_base = OTHER; note = phosphorothioate linkage
  modified_base 2..3: mod_base = OTHER; note = phosphorothioate linkage
  source 1..21: mol_type = other RNA
atgagattaatcctgaaacca

SEQ ID NO: 432 - RNA, 21 nt, synthetic construct
  misc_feature 1..21: note = Description of origin: siRNA sense strands
  misc_feature 1..21: note = Description of source:Sense strand ID:
  modified_base 1: mod_base = OTHER; note = 2'O-methyl-guanosine
  modified_base 2: mod_base = OTHER; note = 2'O-methyl-adenosine
  modified_base 3: mod_base = OTHER; note = 2'O-methyl-uridine
  modified_base 4: mod_base = OTHER; note = 2'O-methyl-guanosine
  modified_base 5: mod_base = OTHER; note = 2'O-methyl-adenosine
  modified_base 6: mod_base = OTHER; note = 2'O-methyl-guanosine
  modified_base 7: mod_base = OTHER; note = 2'Fluoro-adenosine
  modified_base 8: mod_base = OTHER; note = 2'O-methyl-uridine
  modified_base 9: mod_base = OTHER; note = 2' Fluoro-uridine
  modified_base 10: mod_base = OTHER; note = 2'Fluoro-adenosine
  modified_base 11: mod_base = OTHER; note = 2'Fluoro-adenosine
  modified_base 12: mod_base = OTHER; note = 2' Fluoro-uridine
  modified_base 13: mod_base = OTHER; note = 2'O-methyl-cytidine
  modified_base 14: mod_base = OTHER; note = 2'O-methyl-cytidine
  modified_base 15: mod_base = OTHER; note = 2'O-methyl-uridine
  modified_base 16: mod_base = OTHER; note = 2'O-methyl-guanosine
  modified_base 17: mod_base = OTHER; note = 2'O-methyl-adenosine
  modified_base 18: mod_base = OTHER; note = 2'O-methyl-adenosine
  modified_base 19: mod_base = OTHER; note = 2'O-methyl-adenosine
  modified_base 20: mod_base = OTHER; note = 2'O-methyl-cytidine
  modified_base 21: mod_base = OTHER; note = 2'O-methyl-cytidine
  modified_base 1..2: mod_base = OTHER; note = phosphorothioate linkage
  modified_base 2..3: mod_base = OTHER; note = phosphorothioate linkage
  source 1..21: mol_type = other RNA
gatgagattaatcctgaaacc

SEQ ID NO: 433 - RNA, 21 nt, synthetic construct
  misc_feature 1..21: note = Description of origin: siRNA sense strands
  misc_feature 1..21: note = Description of source:Sense strand ID:
  modified_base 1: mod_base = OTHER; note = 2'O-methyl-cytidine
  modified_base 2: mod_base = OTHER; note = 2'O-methyl-uridine
  modified_base 3: mod_base = OTHER; note = 2'O-methyl-guanosine
  modified_base 4: mod_base = OTHER; note = 2'O-methyl-uridine
  modified_base 5: mod_base = OTHER; note = 2'O-methyl-uridine
  modified_base 6: mod_base = OTHER; note = 2'O-methyl-uridine
  modified_base 7: mod_base = OTHER; note = 2' Fluoro-guanosine
  modified_base 8: mod_base = OTHER; note = 2'O-methyl-adenosine
  modified_base 9: mod_base = OTHER; note = 2' Fluoro-uridine
  modified_base 10: mod_base = OTHER; note = 2' Fluoro-guanosine
  modified_base 11: mod_base = OTHER; note = 2'Fluoro-adenosine
  modified_base 12: mod_base = OTHER; note = 2' Fluoro-guanosine
  modified_base 13: mod_base = OTHER; note = 2'O-methyl-adenosine
  modified_base 14: mod_base = OTHER; note = 2'O-methyl-uridine
  modified_base 15: mod_base = OTHER; note = 2'O-methyl-uridine
  modified_base 16: mod_base = OTHER; note = 2'O-methyl-adenosine
  modified_base 17: mod_base = OTHER; note = 2'O-methyl-adenosine
  modified_base 18: mod_base = OTHER; note = 2'O-methyl-uridine
  modified_base 19: mod_base = OTHER; note = 2'O-methyl-cytidine
  modified_base 20: mod_base = OTHER; note = 2'O-methyl-cytidine
  modified_base 21: mod_base = OTHER; note = 2'O-methyl-uridine
  modified_base 1..2: mod_base = OTHER; note = phosphorothioate linkage
  modified_base 2..3: mod_base = OTHER; note = phosphorothioate linkage
  source 1..21: mol_type = other RNA
ctgtttgatgagattaatcct

SEQ ID NO: 434 - RNA, 21 nt, synthetic construct
  misc_feature 1..21: note = Description of origin: siRNA sense strands
  misc_feature 1..21: note = Description of source:Sense strand ID:
  modified_base 1: mod_base = OTHER; note = 2'O-methyl-uridine
  modified_base 2: mod_base = OTHER; note = 2'O-methyl-uridine
  modified_base 3: mod_base = OTHER; note = 2'O-methyl-uridine
  modified_base 4: mod_base = OTHER; note = 2'O-methyl-uridine
  modified_base 5: mod_base = OTHER; note = 2'O-methyl-guanosine
  modified_base 6: mod_base = OTHER; note = 2'O-methyl-cytidine
  modified_base 7: mod_base = OTHER; note = 2' Fluoro-cytidine
  modified_base 8: mod_base = OTHER; note = 2'O-methyl-uridine
  modified_base 9: mod_base = OTHER; note = 2' Fluoro-uridine
  modified_base 10: mod_base = OTHER; note = 2' Fluoro-cytidine
  modified_base 11: mod_base = OTHER; note = 2'Fluoro-adenosine
  modified_base 12: mod_base = OTHER; note = 2' Fluoro-uridine
  modified_base 13: mod_base = OTHER; note = 2'O-methyl-cytidine
  modified_base 14: mod_base = OTHER; note = 2'O-methyl-cytidine
  modified_base 15: mod_base = OTHER; note = 2'O-methyl-adenosine
  modified_base 16: mod_base = OTHER; note = 2'O-methyl-cytidine
  modified_base 17: mod_base = OTHER; note = 2'O-methyl-adenosine
  modified_base 18: mod_base = OTHER; note = 2'O-methyl-adenosine
  modified_base 19: mod_base = OTHER; note = 2'O-methyl-guanosine
  modified_base 20: mod_base = OTHER; note = 2'O-methyl-guanosine
  modified_base 21: mod_base = OTHER; note = 2'O-methyl-adenosine
  modified_base 1..2: mod_base = OTHER; note = phosphorothioate linkage
  modified_base 2..3: mod_base = OTHER; note = phosphorothioate linkage
  source 1..21: mol_type = other RNA
ttttgccttcatccacaagga

SEQ ID NO: 435 - RNA, 21 nt, synthetic construct
  misc_feature 1..21: note = Description of origin: siRNA sense strands
  misc_feature 1..21: note = Description of source:Sense strand ID:
  modified_base 1: mod_base = OTHER; note = 2'O-methyl-cytidine
  modified_base 2: mod_base = OTHER; note = 2'O-methyl-guanosine
  modified_base 3: mod_base = OTHER; note = 2'O-methyl-adenosine
  modified_base 4: mod_base = OTHER; note = 2'O-methyl-adenosine
  modified_base 5: mod_base = OTHER; note = 2'O-methyl-adenosine
  modified_base 6: mod_base = OTHER; note = 2'O-methyl-guanosine
  modified_base 7: mod_base = OTHER; note = 2'Fluoro-adenosine
  modified_base 8: mod_base = OTHER; note = 2'O-methyl-uridine
  modified_base 9: mod_base = OTHER; note = 2' Fluoro-cytidine
  modified_base 10: mod_base = OTHER; note = 2' Fluoro-uridine
  modified_base 11: mod_base = OTHER; note = 2' Fluoro-cytidine
  modified_base 12: mod_base = OTHER; note = 2' Fluoro-cytidine
  modified_base 13: mod_base = OTHER; note = 2'O-methyl-adenosine
  modified_base 14: mod_base = OTHER; note = 2'O-methyl-uridine
  modified_base 15: mod_base = OTHER; note = 2'O-methyl-guanosine
  modified_base 16: mod_base = OTHER; note = 2'O-methyl-adenosine
  modified_base 17: mod_base = OTHER; note = 2'O-methyl-guanosine
  modified_base 18: mod_base = OTHER; note = 2'O-methyl-guanosine
  modified_base 19: mod_base = OTHER; note = 2'O-methyl-cytidine
  modified_base 20: mod_base = OTHER; note = 2'O-methyl-adenosine
  modified_base 21: mod_base = OTHER; note = 2'O-methyl-cytidine
  modified_base 1..2: mod_base = OTHER; note = phosphorothioate linkage
  modified_base 2..3: mod_base = OTHER; note = phosphorothioate linkage
  source 1..21: mol_type = other RNA
cgaaagatctccatgaggcac

SEQ ID NO: 436 - RNA, 21 nt, synthetic construct
  misc_feature 1..21: note = Description of origin: siRNA sense strands
  misc_feature 1..21: note = Description of source:Sense strand ID:
  modified_base 1: mod_base = OTHER; note = 2'O-methyl-uridine
  modified_base 2: mod_base = OTHER; note = 2'O-methyl-guanosine
  modified_base 3: mod_base = OTHER; note = 2'O-methyl-cytidine
  modified_base 4: mod_base = OTHER; note = 2'O-methyl-uridine
  modified_base 5: mod_base = OTHER; note = 2'O-methyl-guanosine
  modified_base 6: mod_base = OTHER; note = 2'O-methyl-guanosine
  modified_base 7: mod_base = OTHER; note = 2' Fluoro-uridine
  modified_base 8: mod_base = OTHER; note = 2'O-methyl-guanosine
  modified_base 9: mod_base = OTHER; note = 2' Fluoro-guanosine
  modified_base 10: mod_base = OTHER; note = 2' Fluoro-uridine
  modified_base 11: mod_base = OTHER; note = 2' Fluoro-cytidine
  modified_base 12: mod_base = OTHER; note = 2' Fluoro-cytidine
  modified_base 13: mod_base = OTHER; note = 2'O-methyl-uridine
  modified_base 14: mod_base = OTHER; note = 2'O-methyl-cytidine
  modified_base 15: mod_base = OTHER; note = 2'O-methyl-adenosine
  modified_base 16: mod_base = OTHER; note = 2'O-methyl-uridine
  modified_base 17: mod_base = OTHER; note = 2'O-methyl-guanosine
  modified_base 18: mod_base = OTHER; note = 2'O-methyl-guanosine
  modified_base 19: mod_base = OTHER; note = 2'O-methyl-adenosine
  modified_base 20: mod_base = OTHER; note = 2'O-methyl-guanosine
  modified_base 21: mod_base = OTHER; note = 2'O-methyl-adenosine
  modified_base 1..2: mod_base = OTHER; note = phosphorothioate linkage
  modified_base 2..3: mod_base = OTHER; note = phosphorothioate linkage
  source 1..21: mol_type = other RNA
tgctggtggtcctcatggaga

SEQ ID NO: 437 - RNA, 21 nt, synthetic construct
  misc_feature 1..21: note = Description of origin: siRNA sense strands
  misc_feature 1..21: note = Description of source:Sense strand ID:
  modified_base 1: mod_base = OTHER; note = 2'O-methyl-cytidine
  modified_base 2: mod_base = OTHER; note = 2'O-methyl-cytidine
  modified_base 3: mod_base = OTHER; note = 2'O-methyl-uridine
  modified_base 4: mod_base = OTHER; note = 2'O-methyl-uridine
  modified_base 5: mod_base = OTHER; note = 2'O-methyl-cytidine
  modified_base 6: mod_base = OTHER; note = 2'O-methyl-adenosine
  modified_base 7: mod_base = OTHER; note = 2' Fluoro-uridine
  modified_base 8: mod_base = OTHER; note = 2'O-methyl-cytidine
  modified_base 9: mod_base = OTHER; note = 2' Fluoro-cytidine
  modified_base 10: mod_base = OTHER; note = 2'Fluoro-adenosine
  modified_base 11: mod_base = OTHER; note = 2' Fluoro-cytidine
  modified_base 12: mod_base = OTHER; note = 2'Fluoro-adenosine
  modified_base 13: mod_base = OTHER; note = 2'O-methyl-adenosine
  modified_base 14: mod_base = OTHER; note = 2'O-methyl-guanosine
  modified_base 15: mod_base = OTHER; note = 2'O-methyl-guanosine
  modified_base 16: mod_base = OTHER; note = 2'O-methyl-adenosine
  modified_base 17: mod_base = OTHER; note = 2'O-methyl-uridine
  modified_base 18: mod_base = OTHER; note = 2'O-methyl-uridine
  modified_base 19: mod_base = OTHER; note = 2'O-methyl-uridine
  modified_base 20: mod_base = OTHER; note = 2'O-methyl-uridine
  modified_base 21: mod_base = OTHER; note = 2'O-methyl-guanosine
  modified_base 1..2: mod_base = OTHER; note = phosphorothioate linkage
  modified_base 2..3: mod_base = OTHER; note = phosphorothioate linkage
  source 1..21: mol_type = other RNA
ccttcatccacaaggattttg

SEQ ID NO: 438 - RNA, 21 nt, synthetic construct
  misc_feature 1..21: note = Description of origin: siRNA sense strands
  misc_feature 1..21: note = Description of source:Sense strand ID:
  modified_base 1: mod_base = OTHER; note = 2'O-methyl-guanosine
  modified_base 2: mod_base = OTHER; note = 2'O-methyl-adenosine
  modified_base 3: mod_base = OTHER; note = 2'O-methyl-adenosine
  modified_base 4: mod_base = OTHER; note = 2'O-methyl-adenosine
  modified_base 5: mod_base = OTHER; note = 2'O-methyl-guanosine
  modified_base 6: mod_base = OTHER; note = 2'O-methyl-adenosine
  modified_base 7: mod_base = OTHER; note = 2' Fluoro-uridine
  modified_base 8: mod_base = OTHER; note = 2'O-methyl-cytidine
  modified_base 9: mod_base = OTHER; note = 2' Fluoro-uridine
  modified_base 10: mod_base = OTHER; note = 2' Fluoro-cytidine
  modified_base 11: mod_base = OTHER; note = 2' Fluoro-cytidine
  modified_base 12: mod_base = OTHER; note = 2'Fluoro-adenosine
  modified_base 13: mod_base = OTHER; note = 2'O-methyl-uridine
  modified_base 14: mod_base = OTHER; note = 2'O-methyl-guanosine
  modified_base 15: mod_base = OTHER; note = 2'O-methyl-adenosine
  modified_base 16: mod_base = OTHER; note = 2'O-methyl-guanosine
  modified_base 17: mod_base = OTHER; note = 2'O-methyl-guanosine
  modified_base 18: mod_base = OTHER; note = 2'O-methyl-cytidine
  modified_base 19: mod_base = OTHER; note = 2'O-methyl-adenosine
  modified_base 20: mod_base = OTHER; note = 2'O-methyl-cytidine
  modified_base 21: mod_base = OTHER; note = 2'O-methyl-guanosine
  modified_base 1..2: mod_base = OTHER; note = phosphorothioate linkage
  modified_base 2..3: mod_base = OTHER; note = phosphorothioate linkage
  source 1..21: mol_type = other RNA
gaaagatctccatgaggcacg

SEQ ID NO: 439 - RNA, 21 nt, synthetic construct
  misc_feature 1..21: note = Description of origin: siRNA sense strands
  misc_feature 1..21: note = Description of source:Sense strand ID:
  modified_base 1: mod_base = OTHER; note = 2'O-methyl-uridine
  modified_base 2: mod_base = OTHER; note = 2'O-methyl-uridine
  modified_base 3: mod_base = OTHER; note = 2'O-methyl-cytidine
  modified_base 4: mod_base = OTHER; note = 2'O-methyl-adenosine
  modified_base 5: mod_base = OTHER; note = 2'O-methyl-uridine
  modified_base 6: mod_base = OTHER; note = 2'O-methyl-cytidine
  modified_base 7: mod_base = OTHER; note = 2' Fluoro-cytidine
  modified_base 8: mod_base = OTHER; note = 2'O-methyl-adenosine
  modified_base 9: mod_base = OTHER; note = 2' Fluoro-cytidine
  modified_base 10: mod_base = OTHER; note = 2'Fluoro-adenosine
  modified_base 11: mod_base = OTHER; note = 2'Fluoro-adenosine
  modified_base 12: mod_base = OTHER; note = 2' Fluoro-guanosine
  modified_base 13: mod_base = OTHER; note = 2'O-methyl-guanosine
  modified_base 14: mod_base = OTHER; note = 2'O-methyl-adenosine
  modified_base 15: mod_base = OTHER; note = 2'O-methyl-uridine
  modified_base 16: mod_base = OTHER; note = 2'O-methyl-uridine
  modified_base 17: mod_base = OTHER; note = 2'O-methyl-uridine
  modified_base 18: mod_base = OTHER; note = 2'O-methyl-uridine
  modified_base 19: mod_base = OTHER; note = 2'O-methyl-guanosine
  modified_base 20: mod_base = OTHER; note = 2'O-methyl-adenosine
  modified_base 21: mod_base = OTHER; note = 2'O-methyl-uridine
  modified_base 1..2: mod_base = OTHER; note = phosphorothioate linkage
  modified_base 2..3: mod_base = OTHER; note = phosphorothioate linkage
  source 1..21: mol_type = other RNA
ttcatccacaaggattttgat

SEQ ID NO: 440 - RNA, 21 nt, synthetic construct
  misc_feature 1..21: note = Description of origin: siRNA sense strands
  misc_feature 1..21: note = Description of source:Sense strand ID:
  modified_base 1: mod_base = OTHER; note = 2'O-methyl-uridine
  modified_base 2: mod_base = OTHER; note = 2'O-methyl-uridine
  modified_base 3: mod_base = OTHER; note = 2'O-methyl-uridine
  modified_base 4: mod_base = OTHER; note = 2'O-methyl-guanosine
  modified_base 5: mod_base = OTHER; note = 2'O-methyl-adenosine
  modified_base 6: mod_base = OTHER; note = 2'O-methyl-uridine
  modified_base 7: mod_base = OTHER; note = 2' Fluoro-guanosine
  modified_base 8: mod_base = OTHER; note = 2'O-methyl-adenosine
  modified_base 9: mod_base = OTHER; note = 2' Fluoro-guanosine
  modified_base 10: mod_base = OTHER; note = 2'Fluoro-adenosine
  modified_base 11: mod_base = OTHER; note = 2' Fluoro-uridine
  modified_base 12: mod_base = OTHER; note = 2' Fluoro-uridine
  modified_base 13: mod_base = OTHER; note = 2'O-methyl-adenosine
  modified_base 14: mod_base = OTHER; note = 2'O-methyl-adenosine
  modified_base 15: mod_base = OTHER; note = 2'O-methyl-uridine
  modified_base 16: mod_base = OTHER; note = 2'O-methyl-cytidine
  modified_base 17: mod_base = OTHER; note = 2'O-methyl-cytidine
  modified_base 18: mod_base = OTHER; note = 2'O-methyl-uridine
  modified_base 19: mod_base = OTHER; note = 2'O-methyl-guanosine
  modified_base 20: mod_base = OTHER; note = 2'O-methyl-adenosine
  modified_base 21: mod_base = OTHER; note = 2'O-methyl-adenosine
  modified_base 1..2: mod_base = OTHER; note = phosphorothioate linkage
  modified_base 2..3: mod_base = OTHER; note = phosphorothioate linkage
  source 1..21: mol_type = other RNA
tttgatgagattaatcctgaa

SEQ ID NO: 441 - RNA, 21 nt, synthetic construct
  misc_feature 1..21: note = Description of origin: siRNA sense strands
  misc_feature 1..21: note = Description of source:Sense strand ID:
  modified_base 1: mod_base = OTHER; note = 2'O-methyl-uridine
  modified_base 2: mod_base = OTHER; note = 2'O-methyl-uridine
  modified_base 3: mod_base = OTHER; note = 2'O-methyl-guanosine
  modified_base 4: mod_base = OTHER; note = 2'O-methyl-cytidine
  modified_base 5: mod_base = OTHER; note = 2'O-methyl-cytidine
  modified_base 6: mod_base = OTHER; note = 2'O-methyl-uridine
  modified_base 7: mod_base = OTHER; note = 2' Fluoro-uridine
  modified_base 8: mod_base = OTHER; note = 2'O-methyl-cytidine
  modified_base 9: mod_base = OTHER; note = 2'Fluoro-adenosine
  modified_base 10: mod_base = OTHER; note = 2' Fluoro-uridine
  modified_base 11: mod_base = OTHER; note = 2' Fluoro-cytidine
  modified_base 12: mod_base = OTHER; note = 2' Fluoro-cytidine
  modified_base 13: mod_base = OTHER; note = 2'O-methyl-adenosine
  modified_base 14: mod_base = OTHER; note = 2'O-methyl-cytidine
  modified_base 15: mod_base = OTHER; note = 2'O-methyl-adenosine
  modified_base 16: mod_base = OTHER; note = 2'O-methyl-adenosine
  modified_base 17: mod_base = OTHER; note = 2'O-methyl-guanosine
  modified_base 18: mod_base = OTHER; note = 2'O-methyl-guanosine
  modified_base 19: mod_base = OTHER; note = 2'O-methyl-adenosine
  modified_base 20: mod_base = OTHER; note = 2'O-methyl-uridine
  modified_base 21: mod_base = OTHER; note = 2'O-methyl-uridine
  modified_base 1..2: mod_base = OTHER; note = phosphorothioate linkage
  modified_base 2..3: mod_base = OTHER; note = phosphorothioate linkage
  source 1..21: mol_type = other RNA
ttgccttcatccacaaggatt

SEQ ID NO: 442 - RNA, 21 nt, synthetic construct
  misc_feature 1..21: note = Description of origin: siRNA sense strands
  misc_feature 1..21: note = Description of source:Sense strand ID:
  modified_base 1: mod_base = OTHER; note = 2'O-methyl-guanosine
  modified_base 2: mod_base = OTHER; note = 2'O-methyl-adenosine
  modified_base 3: mod_base = OTHER; note = 2'O-methyl-uridine
  modified_base 4: mod_base = OTHER; note = 2'O-methyl-cytidine
  modified_base 5: mod_base = OTHER; note = 2'O-methyl-uridine
  modified_base 6: mod_base = OTHER; note = 2'O-methyl-cytidine
  modified_base 7: mod_base = OTHER; note = 2' Fluoro-cytidine
  modified_base 8: mod_base = OTHER; note = 2'O-methyl-adenosine
  modified_base 9: mod_base = OTHER; note = 2' Fluoro-uridine
  modified_base 10: mod_base = OTHER; note = 2' Fluoro-guanosine
  modified_base 11: mod_base = OTHER; note = 2'Fluoro-adenosine
  modified_base 12: mod_base = OTHER; note = 2' Fluoro-guanosine
  modified_base 13: mod_base = OTHER; note = 2'O-methyl-guanosine
  modified_base 14: mod_base = OTHER; note = 2'O-methyl-cytidine
  modified_base 15: mod_base = OTHER; note = 2'O-methyl-adenosine
  modified_base 16: mod_base = OTHER; note = 2'O-methyl-cytidine
  modified_base 17: mod_base = OTHER; note = 2'O-methyl-guanosine
  modified_base 18: mod_base = OTHER; note = 2'O-methyl-adenosine
  modified_base 19: mod_base = OTHER; note = 2'O-methyl-uridine
  modified_base 20: mod_base = OTHER; note = 2'O-methyl-guanosine
  modified_base 21: mod_base = OTHER; note = 2'O-methyl-guanosine
  modified_base 1..2: mod_base = OTHER; note = phosphorothioate linkage
  modified_base 2..3: mod_base = OTHER; note = phosphorothioate linkage
  source 1..21: mol_type = other RNA
gatctccatgaggcacgatgg

SEQ ID NO: 443 - RNA, 23 nt, Homo sapiens
  misc_feature 1..23: note = Description of sequence: Oligonucleotide mRNA target sequence; Reference sequence ID: NM_016186.3; Starting position on reference sequence: 1370
  source 1..23: mol_type = mRNA
cctaccaaggaaatgccaccatg

SEQ ID NO: 444 - RNA, 23 nt, Homo sapiens
  misc_feature 1..23: note = Description of sequence: Oligonucleotide mRNA target sequence; Reference sequence ID: NM_016186.3; Starting position on reference sequence: 760
  source 1..23: mol_type = mRNA
cgaaagatctccatgaggcacga

SEQ ID NO: 445 - RNA, 23 nt, Homo sapiens
  misc_feature 1..23: note = Description of sequence: Oligonucleotide mRNA target sequence; Reference sequence ID: NM_000185.4; Starting position on reference sequence: 1193
  source 1..23: mol_type = mRNA
caaaaaagcatgacaaacagaac

SEQ ID NO: 446 - RNA, 23 nt, Homo sapiens
  misc_feature 1..23: note = Description of sequence: Oligonucleotide mRNA target sequence; Reference sequence ID: NM_000185.4; Starting position on reference sequence: 1196
  source 1..23: mol_type = mRNA
aaaagcatgacaaacagaactcg

SEQ ID NO: 447 - RNA, 23 nt, Homo sapiens
  misc_feature 1..23: note = Description of sequence: Oligonucleotide mRNA target sequence; Reference sequence ID: NM_001497.4; Starting position on reference sequence: 2209
  source 1..23: mol_type = mRNA
gtaaacttgaatttcctatgtat

SEQ ID NO: 448 - RNA, 23 nt, Homo sapiens
  misc_feature 1..23: note = Description of sequence: Oligonucleotide mRNA target sequence; Reference sequence ID: NM_001497.4; Starting position on reference sequence: 2212
  source 1..23: mol_type = mRNA
aacttgaatttcctatgtatttt

SEQ ID NO: 449 - RNA, 23 nt, synthetic construct
  misc_feature 1..23: note = Description of sequence: Antisense Strand Base Sequence; Reference sequence ID: NM_016186.3; Corresponding positions on reference sequence: 1370-1391
  source 1..23: mol_type = other RNA
catggtggcatttccttggtagg

SEQ ID NO: 450 - RNA, 23 nt, synthetic construct
  misc_feature 1..23: note = Description of sequence: Antisense Strand Base Sequence; Reference sequence ID: NM_016186.3; Corresponding positions on reference sequence: 760-781
  source 1..23: mol_type = other RNA
tcgtgcctcatggagatctttcg

SEQ ID NO: 451 - RNA, 23 nt, synthetic construct
  misc_feature 1..23: note = Description of sequence: Antisense Strand Base Sequence; Reference sequence ID: NM_000185.4; Corresponding positions on reference sequence: 1193-1214
  source 1..23: mol_type = other RNA
gttctgtttgtcatgcttttttg

SEQ ID NO: 452 - RNA, 23 nt, synthetic construct
  misc_feature 1..23: note = Description of sequence: Antisense Strand Base Sequence; Reference sequence ID: NM_000185.4; Corresponding positions on reference sequence: 1196-1217
  source 1..23: mol_type = other RNA
cgagttctgtttgtcatgctttt

SEQ ID NO: 453 - RNA, 23 nt, synthetic construct
  misc_feature 1..23: note = Description of sequence: Antisense Strand Base Sequence; Reference sequence ID: NM_001497.4; Corresponding positions on reference sequence: 2209-2230
  source 1..23: mol_type = other RNA
atacataggaaattcaagtttac

SEQ ID NO: 454 - RNA, 23 nt, synthetic construct
  misc_feature 1..23: note = Description of sequence: Antisense Strand Base Sequence; Reference sequence ID: NM_001497.4; Corresponding positions on reference sequence: 2212-2233
  source 1..23: mol_type = other RNA
aaaatacataggaaattcaagtt

SEQ ID NO: 455 - RNA, 21 nt, synthetic construct
  misc_feature 1..21: note = Description of sequence: Sense Strand Base Sequence; Reference sequence ID: NM_016186.3; Corresponding positions on reference sequence: 1370-1391
  source 1..21: mol_type = other RNA
taccaaggaaatgccaccatg

SEQ ID NO: 456 - RNA, 21 nt, synthetic construct
  misc_feature 1..21: note = Description of sequence: Sense Strand Base Sequence; Reference sequence ID: NM_016186.3; Corresponding positions on reference sequence: 760-781
  source 1..21: mol_type = other RNA
aaagatctccatgaggcacga

SEQ ID NO: 457 - RNA, 21 nt, synthetic construct
  misc_feature 1..21: note = Description of sequence: Sense Strand Base Sequence; Reference sequence ID: NM_000185.4; Corresponding positions on reference sequence: 1193-1214
  source 1..21: mol_type = other RNA
aaaaagcatgacaaacagaac

SEQ ID NO: 458 - RNA, 21 nt, synthetic construct
  misc_feature 1..21: note = Description of sequence: Sense Strand Base Sequence; Reference sequence ID: NM_000185.4; Corresponding positions on reference sequence: 1196-1217
  source 1..21: mol_type = other RNA
aagcatgacaaacagaactcg

SEQ ID NO: 459 - RNA, 21 nt, synthetic construct
  misc_feature 1..21: note = Description of sequence: Sense Strand Base Sequence; Reference sequence ID: NM_001497.4; Corresponding positions on reference sequence: 2209-2230
  source 1..21: mol_type = other RNA
aaacttgaatttcctatgtat

SEQ ID NO: 460 - RNA, 21 nt, synthetic construct
  misc_feature 1..21: note = Description of sequence: Sense Strand Base Sequence; Reference sequence ID: NM_001497.4; Corresponding positions on reference sequence: 2212-2233
  source 1..21: mol_type = other RNA
cttgaatttcctatgtatttt

SEQ ID NO: 461 - RNA, 23 nt, synthetic construct
  misc_feature 1..23: note = Description of sequence: ZPI siRNA antisense strands, modified; Antisense strand IDETXS1036; Based on: SEQ ID NO: 449
  source 1..23: mol_type = other RNA
  modified_base 1^2: mod_base = OTHER; note = phosphorothioate linkage
  modified_base 2^3: mod_base = OTHER; note = phosphorothioate linkage
  modified_base 21^22: mod_base = OTHER; note = phosphorothioate linkage
  modified_base 22^23: mod_base = OTHER; note = phosphorothioate linkage
  modified_base 1: mod_base = cm
  modified_base 2: mod_base = OTHER; note = 2'Fluoro-adenosine
  modified_base 3: mod_base = um
  modified_base 4: mod_base = OTHER; note = 2'Fluoro-guanosine
  modified_base 5: mod_base = gm
  modified_base 6: mod_base = OTHER; note = 2'Fluoro-uridine
  modified_base 7: mod_base = gm
  modified_base 8: mod_base = gm
  modified_base 9: mod_base = cm
  modified_base 10: mod_base = OTHER; note = 2'O-methyl-adenosine
  modified_base 11: mod_base = um
  modified_base 12: mod_base = um
  modified_base 13: mod_base = um
  modified_base 14: mod_base = OTHER; note = 2'Fluoro-cytidine
  modified_base 15: mod_base = cm
  modified_base 16: mod_base = OTHER; note = 2'Fluoro-uridine
  modified_base 17: mod_base = um
  modified_base 18: mod_base = gm
  modified_base 19: mod_base = gm
  modified_base 20: mod_base = um
  modified_base 21: mod_base = OTHER; note = 2'O-methyl-adenosine
  modified_base 22: mod_base = gm
  modified_base 23: mod_base = gm
catggtggcatttccttggtagg

SEQ ID NO: 462 - RNA, 23 nt, synthetic construct
  misc_feature 1..23: note = Description of sequence: ZPI siRNA antisense strands, modified; Antisense strand IDETXS2398; Based on: SEQ ID NO: 449
  source 1..23: mol_type = other RNA
  modified_base 1^2: mod_base = OTHER; note = phosphorothioate linkage
  modified_base 2^3: mod_base = OTHER; note = phosphorothioate linkage
  modified_base 21^22: mod_base = OTHER; note = phosphorothioate linkage
  modified_base 22^23: mod_base = OTHER; note = phosphorothioate linkage
  modified_base 1: mod_base = cm
  modified_base 2: mod_base = OTHER; note = 2'Fluoro-adenosine
  modified_base 3: mod_base = um
  modified_base 4: mod_base = gm
  modified_base 5: mod_base = gm
  modified_base 6: mod_base = OTHER; note = 2'Fluoro-uridine
  modified_base 7: mod_base = gm
  modified_base 8: mod_base = gm
  modified_base 9: mod_base = OTHER; note = 2'Fluoro-cytidine
  modified_base 10: mod_base = OTHER; note = 2'O-methyl-adenosine
  modified_base 11: mod_base = um
  modified_base 12: mod_base = um
  modified_base 13: mod_base = um
  modified_base 14: mod_base = OTHER; note = 2'Fluoro-cytidine
  modified_base 15: mod_base = cm
  modified_base 16: mod_base = OTHER; note = 2'Fluoro-uridine
  modified_base 17: mod_base = um
  modified_base 18: mod_base = gm
  modified_base 19: mod_base = gm
  modified_base 20: mod_base = um
  modified_base 21: mod_base = OTHER; note = 2'O-methyl-adenosine
  modified_base 22: mod_base = gm
  modified_base 23: mod_base = gm
catggtggcatttccttggtagg

SEQ ID NO: 463 - RNA, 23 nt, synthetic construct
  misc_feature 1..23: note = Description of sequence: ZPI siRNA antisense strands, modified; Antisense strand IDETXS1040; Based on: SEQ ID NO: 450
  source 1..23: mol_type = other RNA
  modified_base 1^2: mod_base = OTHER; note = phosphorothioate linkage
  modified_base 2^3: mod_base = OTHER; note = phosphorothioate linkage
  modified_base 21^22: mod_base = OTHER; note = phosphorothioate linkage
  modified_base 22^23: mod_base = OTHER; note = phosphorothioate linkage
  modified_base 1: mod_base = um
  modified_base 2: mod_base = OTHER; note = 2'Fluoro-cytidine
  modified_base 3: mod_base = gm
  modified_base 4: mod_base = OTHER; note = 2'Fluoro-uridine
  modified_base 5: mod_base = gm
  modified_base 6: mod_base = OTHER; note = 2'Fluoro-cytidine
  modified_base 7: mod_base = cm
  modified_base 8: mod_base = um
  modified_base 9: mod_base = cm
  modified_base 10: mod_base = OTHER; note = 2'O-methyl-adenosine
  modified_base 11: mod_base = um
  modified_base 12: mod_base = gm
  modified_base 13: mod_base = gm
  modified_base 14: mod_base = OTHER; note = 2'Fluoro-adenosine
  modified_base 15: mod_base = gm
  modified_base 16: mod_base = OTHER; note = 2'Fluoro-adenosine
  modified_base 17: mod_base = um
  modified_base 18: mod_base = cm
  modified_base 19: mod_base = um
  modified_base 20: mod_base = um
  modified_base 21: mod_base = um
  modified_base 22: mod_base = cm
  modified_base 23: mod_base = gm
tcgtgcctcatggagatctttcg

SEQ ID NO: 464 - RNA, 23 nt, synthetic construct
  misc_feature 1..23: note = Description of sequence: ZPI siRNA antisense strands, modified; Antisense strand IDETXS2416; Based on: SEQ ID NO: 450
  source 1..23: mol_type = other RNA
  modified_base 1^2: mod_base = OTHER; note = phosphorothioate linkage
  modified_base 2^3: mod_base = OTHER; note = phosphorothioate linkage
  modified_base 21^22: mod_base = OTHER; note = phosphorothioate linkage
  modified_base 22^23: mod_base = OTHER; note = phosphorothioate linkage
  modified_base 1: mod_base = um
  modified_base 2: mod_base = OTHER; note = 2'Fluoro-cytidine
  modified_base 3: mod_base = gm
  modified_base 4: mod_base = um
  modified_base 5: mod_base = gm
  modified_base 6: mod_base = OTHER; note = 2'Fluoro-cytidine
  modified_base 7: mod_base = cm
  modified_base 8: mod_base = um
  modified_base 9: mod_base = OTHER; note = 2'Fluoro-cytidine
  modified_base 10: mod_base = OTHER; note = 2'O-methyl-adenosine
  modified_base 11: mod_base = um
  modified_base 12: mod_base = gm
  modified_base 13: mod_base = gm
  modified_base 14: mod_base = OTHER; note = 2'Fluoro-adenosine
  modified_base 15: mod_base = gm
  modified_base 16: mod_base = OTHER; note = 2'Fluoro-adenosine
  modified_base 17: mod_base = um
  modified_base 18: mod_base = cm
  modified_base 19: mod_base = um
  modified_base 20: mod_base = um
  modified_base 21: mod_base = um
  modified_base 22: mod_base = cm
  modified_base 23: mod_base = gm
tcgtgcctcatggagatctttcg

SEQ ID NO: 465 - RNA, 23 nt, synthetic construct
  misc_feature 1..23: note = Description of sequence: HCII siRNA antisense strands, modified; Antisense strand IDETXS636; Based on: SEQ ID NO: 451
  source 1..23: mol_type = other RNA
  modified_base 1^2: mod_base = OTHER; note = phosphorothioate linkage
  modified_base 2^3: mod_base = OTHER; note = phosphorothioate linkage
  modified_base 21^22: mod_base = OTHER; note = phosphorothioate linkage
  modified_base 22^23: mod_base = OTHER; note = phosphorothioate linkage
  modified_base 1: mod_base = gm
  modified_base 2: mod_base = OTHER; note = 2'Fluoro-uridine
  modified_base 3: mod_base = um
  modified_base 4: mod_base = OTHER; note = 2'Fluoro-cytidine
  modified_base 5: mod_base = um
  modified_base 6: mod_base = OTHER; note = 2'Fluoro-guanosine
  modified_base 7: mod_base = um
  modified_base 8: mod_base = um
  modified_base 9: mod_base = um
  modified_base 10: mod_base = gm
  modified_base 11: mod_base = um
  modified_base 12: mod_base = cm
  modified_base 13: mod_base = OTHER; note = 2'O-methyl-adenosine
  modified_base 14: mod_base = OTHER; note = 2'Fluoro-uridine
  modified_base 15: mod_base = gm
  modified_base 16: mod_base = OTHER; note = 2'Fluoro-cytidine
  modified_base 17: mod_base = um
  modified_base 18: mod_base = um
  modified_base 19: mod_base = um
  modified_base 20: mod_base = um
  modified_base 21: mod_base = um
  modified_base 22: mod_base = um
  modified_base 23: mod_base = gm
gttctgtttgtcatgcttttttg

SEQ ID NO: 466 - RNA, 23 nt, synthetic construct
  misc_feature 1..23: note = Description of sequence: HCII siRNA antisense strands, modified; Antisense strand IDETXS2434; Based on: SEQ ID NO: 451
  source 1..23: mol_type = other RNA
  modified_base 1^2: mod_base = OTHER; note = phosphorothioate linkage
  modified_base 2^3: mod_base = OTHER; note = phosphorothioate linkage
  modified_base 21^22: mod_base = OTHER; note = phosphorothioate linkage
  modified_base 22^23: mod_base = OTHER; note = phosphorothioate linkage
  modified_base 1: mod_base = gm
  modified_base 2: mod_base = OTHER; note = 2'Fluoro-uridine
  modified_base 3: mod_base = um
  modified_base 4: mod_base = cm
  modified_base 5: mod_base = um
  modified_base 6: mod_base = OTHER; note = 2'Fluoro-guanosine
  modified_base 7: mod_base = um
  modified_base 8: mod_base = um
  modified_base 9: mod_base = OTHER; note = 2'Fluoro-uridine
  modified_base 10: mod_base = gm
  modified_base 11: mod_base = um
  modified_base 12: mod_base = cm
  modified_base 13: mod_base = OTHER; note = 2'O-methyl-adenosine
  modified_base 14: mod_base = OTHER; note = 2'Fluoro-uridine
  modified_base 15: mod_base = gm
  modified_base 16: mod_base = OTHER; note = 2'Fluoro-cytidine
  modified_base 17: mod_base = um
  modified_base 18: mod_base = um
  modified_base 19: mod_base = um
  modified_base 20: mod_base = um
  modified_base 21: mod_base = um
  modified_base 22: mod_base = um
  modified_base 23: mod_base = gm
gttctgtttgtcatgcttttttg

SEQ ID NO: 467 - RNA, 23 nt, synthetic construct
  misc_feature 1..23: note = Description of sequence: HCII siRNA antisense strands, modified; Antisense strand IDETXS644; Based on: SEQ ID NO: 452
  source 1..23: mol_type = other RNA
  modified_base 1^2: mod_base = OTHER; note = phosphorothioate linkage
  modified_base 2^3: mod_base = OTHER; note = phosphorothioate linkage
  modified_base 21^22: mod_base = OTHER; note = phosphorothioate linkage
  modified_base 22^23: mod_base = OTHER; note = phosphorothioate linkage
  modified_base 1: mod_base = cm
  modified_base 2: mod_base = OTHER; note = 2'Fluoro-guanosine
  modified_base 3: mod_base = OTHER; note = 2'O-methyl-adenosine
  modified_base 4: mod_base = OTHER; note = 2'Fluoro-guanosine
  modified_base 5: mod_base = um
  modified_base 6: mod_base = OTHER; note = 2'Fluoro-uridine
  modified_base 7: mod_base = cm
  modified_base 8: mod_base = um
  modified_base 9: mod_base = gm
  modified_base 10: mod_base = um
  modified_base 11: mod_base = um
  modified_base 12: mod_base = um
  modified_base 13: mod_base = gm
  modified_base 14: mod_base = OTHER; note = 2'Fluoro-uridine
  modified_base 15: mod_base = cm
  modified_base 16: mod_base = OTHER; note = 2'Fluoro-adenosine
  modified_base 17: mod_base = um
  modified_base 18: mod_base = gm
  modified_base 19: mod_base = cm
  modified_base 20: mod_base = um
  modified_base 21: mod_base = um
  modified_base 22: mod_base = um
  modified_base 23: mod_base = um
cgagttctgtttgtcatgctttt

SEQ ID NO: 468 - RNA, 23 nt, synthetic construct
  misc_feature 1..23: note = Description of sequence: HCII siRNA antisense strands, modified; Antisense strand IDETXS2452; Based on: SEQ ID NO: 452
  source 1..23: mol_type = other RNA
  modified_base 1^2: mod_base = OTHER; note = phosphorothioate linkage
  modified_base 2^3: mod_base = OTHER; note = phosphorothioate linkage
  modified_base 21^22: mod_base = OTHER; note = phosphorothioate linkage
  modified_base 22^23: mod_base = OTHER; note = phosphorothioate linkage
  modified_base 1: mod_base = cm
  modified_base 2: mod_base = OTHER; note = 2'Fluoro-guanosine
  modified_base 3: mod_base = OTHER; note = 2'O-methyl-adenosine
  modified_base 4: mod_base = gm
  modified_base 5: mod_base = um
  modified_base 6: mod_base = OTHER; note = 2'Fluoro-uridine
  modified_base 7: mod_base = cm
  modified_base 8: mod_base = um
  modified_base 9: mod_base = OTHER; note = 2'Fluoro-guanosine
  modified_base 10: mod_base = um
  modified_base 11: mod_base = um
  modified_base 12: mod_base = um
  modified_base 13: mod_base = gm
  modified_base 14: mod_base = OTHER; note = 2'Fluoro-uridine
  modified_base 15: mod_base = cm
  modified_base 16: mod_base = OTHER; note = 2'Fluoro-adenosine
  modified_base 17: mod_base = um
  modified_base 18: mod_base = gm
  modified_base 19: mod_base = cm
  modified_base 20: mod_base = um
  modified_base 21: mod_base = um
  modified_base 22: mod_base = um
  modified_base 23: mod_base = um
cgagttctgtttgtcatgctttt

SEQ ID NO: 469 - RNA, 23 nt, synthetic construct
  misc_feature 1..23: note = Description of sequence: B4GALT1 siRNA antisense strands, modifiedAntisense strand IDETXS2400; Based on: SEQ ID NO: 453
  source 1..23: mol_type = other RNA
  modified_base 1^2: mod_base = OTHER; note = phosphorothioate linkage
  modified_base 2^3: mod_base = OTHER; note = phosphorothioate linkage
  modified_base 21^22: mod_base = OTHER; note = phosphorothioate linkage
  modified_base 22^23: mod_base = OTHER; note = phosphorothioate linkage
  modified_base 1: mod_base = OTHER; note = 2'O-methyl-adenosine
  modified_base 2: mod_base = OTHER; note = 2'Fluoro-uridine
  modified_base 3: mod_base = OTHER; note = 2'O-methyl-adenosine
  modified_base 4: mod_base = OTHER; note = 2'Fluoro-cytidine
  modified_base 5: mod_base = OTHER; note = 2'O-methyl-adenosine
  modified_base 6: mod_base = OTHER; note = 2'Fluoro-uridine
  modified_base 7: mod_base = OTHER; note = 2'O-methyl-adenosine
  modified_base 8: mod_base = gm
  modified_base 9: mod_base = gm
  modified_base 10: mod_base = OTHER; note = 2'O-methyl-adenosine
  modified_base 11: mod_base = OTHER; note = 2'O-methyl-adenosine
  modified_base 12: mod_base = OTHER; note = 2'O-methyl-adenosine
  modified_base 13: mod_base = um
  modified_base 14: mod_base = OTHER; note = 2'Fluoro-uridine
  modified_base 15: mod_base = cm
  modified_base 16: mod_base = OTHER; note = 2'Fluoro-adenosine
  modified_base 17: mod_base = OTHER; note = 2'O-methyl-adenosine
  modified_base 18: mod_base = gm
  modified_base 19: mod_base = um
  modified_base 20: mod_base = um
  modified_base 21: mod_base = um
  modified_base 22: mod_base = OTHER; note = 2'O-methyl-adenosine
  modified_base 23: mod_base = cm
atacataggaaattcaagtttac

SEQ ID NO: 470 - RNA, 23 nt, synthetic construct
  misc_feature 1..23: note = Description of sequence: B4GALT1 siRNA antisense strands, modifiedAntisense strand IDETXS2402; Based on: SEQ ID NO: 453
  source 1..23: mol_type = other RNA
  modified_base 1^2: mod_base = OTHER; note = phosphorothioate linkage
  modified_base 2^3: mod_base = OTHER; note = phosphorothioate linkage
  modified_base 21^22: mod_base = OTHER; note = phosphorothioate linkage
  modified_base 22^23: mod_base = OTHER; note = phosphorothioate linkage
  modified_base 1: mod_base = OTHER; note = 2'O-methyl-adenosine
  modified_base 2: mod_base = OTHER; note = 2'Fluoro-uridine
  modified_base 3: mod_base = OTHER; note = 2'O-methyl-adenosine
  modified_base 4: mod_base = cm
  modified_base 5: mod_base = OTHER; note = 2'O-methyl-adenosine
  modified_base 6: mod_base = OTHER; note = 2'Fluoro-uridine
  modified_base 7: mod_base = OTHER; note = 2'O-methyl-adenosine
  modified_base 8: mod_base = gm
  modified_base 9: mod_base = OTHER; note = 2'Fluoro-guanosine
  modified_base 10: mod_base = OTHER; note = 2'O-methyl-adenosine
  modified_base 11: mod_base = OTHER; note = 2'O-methyl-adenosine
  modified_base 12: mod_base = OTHER; note = 2'O-methyl-adenosine
  modified_base 13: mod_base = um
  modified_base 14: mod_base = OTHER; note = 2'Fluoro-uridine
  modified_base 15: mod_base = cm
  modified_base 16: mod_base = OTHER; note = 2'Fluoro-adenosine
  modified_base 17: mod_base = OTHER; note = 2'O-methyl-adenosine
  modified_base 18: mod_base = gm
  modified_base 19: mod_base = um
  modified_base 20: mod_base = um
  modified_base 21: mod_base = um
  modified_base 22: mod_base = OTHER; note = 2'O-methyl-adenosine
  modified_base 23: mod_base = cm
atacataggaaattcaagtttac

SEQ ID NO: 471 - RNA, 23 nt, synthetic construct
  misc_feature 1..23: note = Description of sequence: B4GALT1 siRNA antisense strands, modifiedAntisense strand IDETXS2406; Based on: SEQ ID NO: 454
  source 1..23: mol_type = other RNA
  modified_base 1^2: mod_base = OTHER; note = phosphorothioate linkage
  modified_base 2^3: mod_base = OTHER; note = phosphorothioate linkage
  modified_base 21^22: mod_base = OTHER; note = phosphorothioate linkage
  modified_base 22^23: mod_base = OTHER; note = phosphorothioate linkage
  modified_base 1: mod_base = OTHER; note = 2'O-methyl-adenosine
  modified_base 2: mod_base = OTHER; note = 2'Fluoro-adenosine
  modified_base 3: mod_base = OTHER; note = 2'O-methyl-adenosine
  modified_base 4: mod_base = OTHER; note = 2'Fluoro-adenosine
  modified_base 5: mod_base = um
  modified_base 6: mod_base = OTHER; note = 2'Fluoro-adenosine
  modified_base 7: mod_base = cm
  modified_base 8: mod_base = OTHER; note = 2'O-methyl-adenosine
  modified_base 9: mod_base = um
  modified_base 10: mod_base = OTHER; note = 2'O-methyl-adenosine
  modified_base 11: mod_base = gm
  modified_base 12: mod_base = gm
  modified_base 13: mod_base = OTHER; note = 2'O-methyl-adenosine
  modified_base 14: mod_base = OTHER; note = 2'Fluoro-adenosine
  modified_base 15: mod_base = OTHER; note = 2'O-methyl-adenosine
  modified_base 16: mod_base = OTHER; note = 2'Fluoro-uridine
  modified_base 17: mod_base = um
  modified_base 18: mod_base = cm
  modified_base 19: mod_base = OTHER; note = 2'O-methyl-adenosine
  modified_base 20: mod_base = OTHER; note = 2'O-methyl-adenosine
  modified_base 21: mod_base = gm
  modified_base 22: mod_base = um
  modified_base 23: mod_base = um
aaaatacataggaaattcaagtt

SEQ ID NO: 472 - RNA, 23 nt, synthetic construct
  misc_feature 1..23: note = Description of sequence: B4GALT1 siRNA antisense strands, modifiedAntisense strand IDETXS2408; Based on: SEQ ID NO: 454
  source 1..23: mol_type = other RNA
  modified_base 1^2: mod_base = OTHER; note = phosphorothioate linkage
  modified_base 2^3: mod_base = OTHER; note = phosphorothioate linkage
  modified_base 21^22: mod_base = OTHER; note = phosphorothioate linkage
  modified_base 22^23: mod_base = OTHER; note = phosphorothioate linkage
  modified_base 1: mod_base = OTHER; note = 2'O-methyl-adenosine
  modified_base 2: mod_base = OTHER; note = 2'Fluoro-adenosine
  modified_base 3: mod_base = OTHER; note = 2'O-methyl-adenosine
  modified_base 4: mod_base = OTHER; note = 2'O-methyl-adenosine
  modified_base 5: mod_base = um
  modified_base 6: mod_base = OTHER; note = 2'Fluoro-adenosine
  modified_base 7: mod_base = cm
  modified_base 8: mod_base = OTHER; note = 2'O-methyl-adenosine
  modified_base 9: mod_base = OTHER; note = 2'Fluoro-uridine
  modified_base 10: mod_base = OTHER; note = 2'O-methyl-adenosine
  modified_base 11: mod_base = gm
  modified_base 12: mod_base = gm
  modified_base 13: mod_base = OTHER; note = 2'O-methyl-adenosine
  modified_base 14: mod_base = OTHER; note = 2'Fluoro-adenosine
  modified_base 15: mod_base = OTHER; note = 2'O-methyl-adenosine
  modified_base 16: mod_base = OTHER; note = 2'Fluoro-uridine
  modified_base 17: mod_base = um
  modified_base 18: mod_base = cm
  modified_base 19: mod_base = OTHER; note = 2'O-methyl-adenosine
  modified_base 20: mod_base = OTHER; note = 2'O-methyl-adenosine
  modified_base 21: mod_base = gm
  modified_base 22: mod_base = um
  modified_base 23: mod_base = um
aaaatacataggaaattcaagtt

SEQ ID NO: 473 - RNA, 21 nt, synthetic construct
  misc_feature 1..21: note = Description of sequence: ZPI siRNA sense strands, modified; Sense strand IDETXS1035; Based on: SEQ ID NO: 455
  source 1..21: mol_type = other RNA
  modified_base 1^2: mod_base = OTHER; note = phosphorothioate linkage
  modified_base 2^3: mod_base = OTHER; note = phosphorothioate linkage
  modified_base 1: mod_base = um
  modified_base 2: mod_base = OTHER; note = 2'O-methyl-adenosine
  modified_base 3: mod_base = cm
  modified_base 4: mod_base = cm
  modified_base 5: mod_base = OTHER; note = 2'O-methyl-adenosine
  modified_base 6: mod_base = OTHER; note = 2'O-methyl-adenosine
  modified_base 7: mod_base = OTHER; note = 2'Fluoro-guanosine
  modified_base 8: mod_base = gm
  modified_base 9: mod_base = OTHER; note = 2'Fluoro-adenosine
  modified_base 10: mod_base = OTHER; note = 2'Fluoro-adenosine
  modified_base 11: mod_base = OTHER; note = 2'Fluoro-adenosine
  modified_base 12: mod_base = OTHER; note = 2'Fluoro-uridine
  modified_base 13: mod_base = gm
  modified_base 14: mod_base = cm
  modified_base 15: mod_base = cm
  modified_base 16: mod_base = OTHER; note = 2'O-methyl-adenosine
  modified_base 17: mod_base = cm
  modified_base 18: mod_base = cm
  modified_base 19: mod_base = OTHER; note = 2'O-methyl-adenosine
  modified_base 20: mod_base = um
  modified_base 21: mod_base = gm
taccaaggaaatgccaccatg

SEQ ID NO: 474 - RNA, 21 nt, synthetic construct
  misc_feature 1..21: note = Description of sequence: ZPI siRNA sense strands, modified; Sense strand IDETXS2397; Based on: SEQ ID NO: 455
  source 1..21: mol_type = other RNA
  modified_base 1^2: mod_base = OTHER; note = phosphorothioate linkage
  modified_base 2^3: mod_base = OTHER; note = phosphorothioate linkage
  modified_base 1: mod_base = um
  modified_base 2: mod_base = OTHER; note = 2'O-methyl-adenosine
  modified_base 3: mod_base = cm
  modified_base 4: mod_base = cm
  modified_base 5: mod_base = OTHER; note = 2'O-methyl-adenosine
  modified_base 6: mod_base = OTHER; note = 2'O-methyl-adenosine
  modified_base 7: mod_base = gm
  modified_base 8: mod_base = gm
  modified_base 9: mod_base = OTHER; note = 2'Fluoro-adenosine
  modified_base 10: mod_base = OTHER; note = 2'Fluoro-adenosine
  modified_base 11: mod_base = OTHER; note = 2'Fluoro-adenosine
  modified_base 12: mod_base = um
  modified_base 13: mod_base = gm
  modified_base 14: mod_base = cm
  modified_base 15: mod_base = cm
  modified_base 16: mod_base = OTHER; note = 2'O-methyl-adenosine
  modified_base 17: mod_base = cm
  modified_base 18: mod_base = cm
  modified_base 19: mod_base = OTHER; note = 2'O-methyl-adenosine
  modified_base 20: mod_base = um
  modified_base 21: mod_base = gm
taccaaggaaatgccaccatg

SEQ ID NO: 475 - RNA, 21 nt, synthetic construct
  misc_feature 1..21: note = Description of sequence: ZPI siRNA sense strands, modified; Sense strand IDETXS1039; Based on: SEQ ID NO: 456
  source 1..21: mol_type = other RNA
  modified_base 1^2: mod_base = OTHER; note = phosphorothioate linkage
  modified_base 2^3: mod_base = OTHER; note = phosphorothioate linkage
  modified_base 1: mod_base = OTHER; note = 2'O-methyl-adenosine
  modified_base 2: mod_base = OTHER; note = 2'O-methyl-adenosine
  modified_base 3: mod_base = OTHER; note = 2'O-methyl-adenosine
  modified_base 4: mod_base = gm
  modified_base 5: mod_base = OTHER; note = 2'O-methyl-adenosine
  modified_base 6: mod_base = um
  modified_base 7: mod_base = OTHER; note = 2'Fluoro-cytidine
  modified_base 8: mod_base = um
  modified_base 9: mod_base = OTHER; note = 2'Fluoro-cytidine
  modified_base 10: mod_base = OTHER; note = 2'Fluoro-cytidine
  modified_base 11: mod_base = OTHER; note = 2'Fluoro-adenosine
  modified_base 12: mod_base = OTHER; note = 2'Fluoro-uridine
  modified_base 13: mod_base = gm
  modified_base 14: mod_base = OTHER; note = 2'O-methyl-adenosine
  modified_base 15: mod_base = gm
  modified_base 16: mod_base = gm
  modified_base 17: mod_base = cm
  modified_base 18: mod_base = OTHER; note = 2'O-methyl-adenosine
  modified_base 19: mod_base = cm
  modified_base 20: mod_base = gm
  modified_base 21: mod_base = OTHER; note = 2'O-methyl-adenosine
aaagatctccatgaggcacga

SEQ ID NO: 476 - RNA, 21 nt, synthetic construct
  misc_feature 1..21: note = Description of sequence: ZPI siRNA sense strands, modified; Sense strand IDETXS2399; Based on: SEQ ID NO: 456
  source 1..21: mol_type = other RNA
  modified_base 1^2: mod_base = OTHER; note = phosphorothioate linkage
  modified_base 2^3: mod_base = OTHER; note = phosphorothioate linkage
  modified_base 1: mod_base = OTHER; note = 2'O-methyl-adenosine
  modified_base 2: mod_base = OTHER; note = 2'O-methyl-adenosine
  modified_base 3: mod_base = OTHER; note = 2'O-methyl-adenosine
  modified_base 4: mod_base = gm
  modified_base 5: mod_base = OTHER; note = 2'O-methyl-adenosine
  modified_base 6: mod_base = um
  modified_base 7: mod_base = cm
  modified_base 8: mod_base = um
  modified_base 9: mod_base = OTHER; note = 2'Fluoro-cytidine
  modified_base 10: mod_base = OTHER; note = 2'Fluoro-cytidine
  modified_base 11: mod_base = OTHER; note = 2'Fluoro-adenosine
  modified_base 12: mod_base = um
  modified_base 13: mod_base = gm
  modified_base 14: mod_base = OTHER; note = 2'O-methyl-adenosine
  modified_base 15: mod_base = gm
  modified_base 16: mod_base = gm
  modified_base 17: mod_base = cm
  modified_base 18: mod_base = OTHER; note = 2'O-methyl-adenosine
  modified_base 19: mod_base = cm
  modified_base 20: mod_base = gm
  modified_base 21: mod_base = OTHER; note = 2'O-methyl-adenosine
aaagatctccatgaggcacga

SEQ ID NO: 477 - RNA, 21 nt, synthetic construct
  misc_feature 1..21: note = Description of sequence: HCII siRNA sense strands, modified; Sense strand IDETXS635; Based on: SEQ ID NO: 457
  source 1..21: mol_type = other RNA
  modified_base 1^2: mod_base = OTHER; note = phosphorothioate linkage
  modified_base 2^3: mod_base = OTHER; note = phosphorothioate linkage
  modified_base 1: mod_base = OTHER; note = 2'O-methyl-adenosine
  modified_base 2: mod_base = OTHER; note = 2'O-methyl-adenosine
  modified_base 3: mod_base = OTHER; note = 2'O-methyl-adenosine
  modified_base 4: mod_base = OTHER; note = 2'O-methyl-adenosine
  modified_base 5: mod_base = OTHER; note = 2'O-methyl-adenosine
  modified_base 6: mod_base = gm
  modified_base 7: mod_base = OTHER; note = 2'Fluoro-cytidine
  modified_base 8: mod_base = OTHER; note = 2'O-methyl-adenosine
  modified_base 9: mod_base = OTHER; note = 2'Fluoro-uridine
  modified_base 10: mod_base = OTHER; note = 2'Fluoro-guanosine
  modified_base 11: mod_base = OTHER; note = 2'Fluoro-adenosine
  modified_base 12: mod_base = OTHER; note = 2'Fluoro-cytidine
  modified_base 13: mod_base = OTHER; note = 2'O-methyl-adenosine
  modified_base 14: mod_base = OTHER; note = 2'O-methyl-adenosine
  modified_base 15: mod_base = OTHER; note = 2'O-methyl-adenosine
  modified_base 16: mod_base = cm
  modified_base 17: mod_base = OTHER; note = 2'O-methyl-adenosine
  modified_base 18: mod_base = gm
  modified_base 19: mod_base = OTHER; note = 2'O-methyl-adenosine
  modified_base 20: mod_base = OTHER; note = 2'O-methyl-adenosine
  modified_base 21: mod_base = cm
aaaaagcatgacaaacagaac

SEQ ID NO: 478 - RNA, 21 nt, synthetic construct
  misc_feature 1..21: note = Description of sequence: HCII siRNA sense strands, modified; Sense strand IDETXS2433; Based on: SEQ ID NO: 457
  source 1..21: mol_type = other RNA
  modified_base 1^2: mod_base = OTHER; note = phosphorothioate linkage
  modified_base 2^3: mod_base = OTHER; note = phosphorothioate linkage
  modified_base 1: mod_base = OTHER; note = 2'O-methyl-adenosine
  modified_base 2: mod_base = OTHER; note = 2'O-methyl-adenosine
  modified_base 3: mod_base = OTHER; note = 2'O-methyl-adenosine
  modified_base 4: mod_base = OTHER; note = 2'O-methyl-adenosine
  modified_base 5: mod_base = OTHER; note = 2'O-methyl-adenosine
  modified_base 6: mod_base = gm
  modified_base 7: mod_base = cm
  modified_base 8: mod_base = OTHER; note = 2'O-methyl-adenosine
  modified_base 9: mod_base = OTHER; note = 2'Fluoro-uridine
  modified_base 10: mod_base = OTHER; note = 2'Fluoro-guanosine
  modified_base 11: mod_base = OTHER; note = 2'Fluoro-adenosine
  modified_base 12: mod_base = cm
  modified_base 13: mod_base = OTHER; note = 2'O-methyl-adenosine
  modified_base 14: mod_base = OTHER; note = 2'O-methyl-adenosine
  modified_base 15: mod_base = OTHER; note = 2'O-methyl-adenosine
  modified_base 16: mod_base = cm
  modified_base 17: mod_base = OTHER; note = 2'O-methyl-adenosine
  modified_base 18: mod_base = gm
  modified_base 19: mod_base = OTHER; note = 2'O-methyl-adenosine
  modified_base 20: mod_base = OTHER; note = 2'O-methyl-adenosine
  modified_base 21: mod_base = cm
aaaaagcatgacaaacagaac

SEQ ID NO: 479 - RNA, 21 nt, synthetic construct
  misc_feature 1..21: note = Description of sequence: HCII siRNA sense strands, modified; Sense strand IDETXS643; Based on: SEQ ID NO: 458
  source 1..21: mol_type = other RNA
  modified_base 1^2: mod_base = OTHER; note = phosphorothioate linkage
  modified_base 2^3: mod_base = OTHER; note = phosphorothioate linkage
  modified_base 1: mod_base = OTHER; note = 2'O-methyl-adenosine
  modified_base 2: mod_base = OTHER; note = 2'O-methyl-adenosine
  modified_base 3: mod_base = gm
  modified_base 4: mod_base = cm
  modified_base 5: mod_base = OTHER; note = 2'O-methyl-adenosine
  modified_base 6: mod_base = um
  modified_base 7: mod_base = OTHER; note = 2'Fluoro-guanosine
  modified_base 8: mod_base = OTHER; note = 2'O-methyl-adenosine
  modified_base 9: mod_base = OTHER; note = 2'Fluoro-cytidine
  modified_base 10: mod_base = OTHER; note = 2'Fluoro-adenosine
  modified_base 11: mod_base = OTHER; note = 2'Fluoro-adenosine
  modified_base 12: mod_base = OTHER; note = 2'Fluoro-adenosine
  modified_base 13: mod_base = cm
  modified_base 14: mod_base = OTHER; note = 2'O-methyl-adenosine
  modified_base 15: mod_base = gm
  modified_base 16: mod_base = OTHER; note = 2'O-methyl-adenosine
  modified_base 17: mod_base = OTHER; note = 2'O-methyl-adenosine
  modified_base 18: mod_base = cm
  modified_base 19: mod_base = um
  modified_base 20: mod_base = cm
  modified_base 21: mod_base = gm
aagcatgacaaacagaactcg

SEQ ID NO: 480 - RNA, 21 nt, synthetic construct
  misc_feature 1..21: note = Description of sequence: HCII siRNA sense strands, modified; Sense strand IDETXS2435; Based on: SEQ ID NO: 458
  source 1..21: mol_type = other RNA
  modified_base 1^2: mod_base = OTHER; note = phosphorothioate linkage
  modified_base 2^3: mod_base = OTHER; note = phosphorothioate linkage
  modified_base 1: mod_base = OTHER; note = 2'O-methyl-adenosine
  modified_base 2: mod_base = OTHER; note = 2'O-methyl-adenosine
  modified_base 3: mod_base = gm
  modified_base 4: mod_base = cm
  modified_base 5: mod_base = OTHER; note = 2'O-methyl-adenosine
  modified_base 6: mod_base = um
  modified_base 7: mod_base = gm
  modified_base 8: mod_base = OTHER; note = 2'O-methyl-adenosine
  modified_base 9: mod_base = OTHER; note = 2'Fluoro-cytidine
  modified_base 10: mod_base = OTHER; note = 2'Fluoro-adenosine
  modified_base 11: mod_base = OTHER; note = 2'Fluoro-adenosine
  modified_base 12: mod_base = OTHER; note = 2'O-methyl-adenosine
  modified_base 13: mod_base = cm
  modified_base 14: mod_base = OTHER; note = 2'O-methyl-adenosine
  modified_base 15: mod_base = gm
  modified_base 16: mod_base = OTHER; note = 2'O-methyl-adenosine
  modified_base 17: mod_base = OTHER; note = 2'O-methyl-adenosine
  modified_base 18: mod_base = cm
  modified_base 19: mod_base = um
  modified_base 20: mod_base = cm
  modified_base 21: mod_base = gm
aagcatgacaaacagaactcg

SEQ ID NO: 481 - RNA, 21 nt, synthetic construct
  misc_feature 1..21: note = Description of sequence: B4GALT1 siRNA sense strands , modified; Sense strand IDETXS2399; Based on: SEQ ID NO: 459
  source 1..21: mol_type = other RNA
  modified_base 1^2: mod_base = OTHER; note = phosphorothioate linkage
  modified_base 2^3: mod_base = OTHER; note = phosphorothioate linkage
  modified_base 1: mod_base = OTHER; note = 2'O-methyl-adenosine
  modified_base 2: mod_base = OTHER; note = 2'O-methyl-adenosine
  modified_base 3: mod_base = OTHER; note = 2'O-methyl-adenosine
  modified_base 4: mod_base = cm
  modified_base 5: mod_base = um
  modified_base 6: mod_base = um
  modified_base 7: mod_base = OTHER; note = 2'Fluoro-guanosine
  modified_base 8: mod_base = OTHER; note = 2'O-methyl-adenosine
  modified_base 9: mod_base = OTHER; note = 2'Fluoro-adenosine
  modified_base 10: mod_base = OTHER; note = 2'Fluoro-uridine
  modified_base 11: mod_base = OTHER; note = 2'Fluoro-uridine
  modified_base 12: mod_base = OTHER; note = 2'Fluoro-uridine
  modified_base 13: mod_base = cm
  modified_base 14: mod_base = cm
  modified_base 15: mod_base = um
  modified_base 16: mod_base = OTHER; note = 2'O-methyl-adenosine
  modified_base 17: mod_base = um
  modified_base 18: mod_base = gm
  modified_base 19: mod_base = um
  modified_base 20: mod_base = OTHER; note = 2'O-methyl-adenosine
  modified_base 21: mod_base = um
aaacttgaatttcctatgtat

SEQ ID NO: 482 - RNA, 21 nt, synthetic construct
  misc_feature 1..21: note = Description of sequence: B4GALT1 siRNA sense strands , modified; Sense strand IDETXS2401; Based on: SEQ ID NO: 459
  source 1..21: mol_type = other RNA
  modified_base 1^2: mod_base = OTHER; note = phosphorothioate linkage
  modified_base 2^3: mod_base = OTHER; note = phosphorothioate linkage
  modified_base 1: mod_base = OTHER; note = 2'O-methyl-adenosine
  modified_base 2: mod_base = OTHER; note = 2'O-methyl-adenosine
  modified_base 3: mod_base = OTHER; note = 2'O-methyl-adenosine
  modified_base 4: mod_base = cm
  modified_base 5: mod_base = um
  modified_base 6: mod_base = um
  modified_base 7: mod_base = gm
  modified_base 8: mod_base = OTHER; note = 2'O-methyl-adenosine
  modified_base 9: mod_base = OTHER; note = 2'Fluoro-adenosine
  modified_base 10: mod_base = OTHER; note = 2'Fluoro-uridine
  modified_base 11: mod_base = OTHER; note = 2'Fluoro-uridine
  modified_base 12: mod_base = um
  modified_base 13: mod_base = cm
  modified_base 14: mod_base = cm
  modified_base 15: mod_base = um
  modified_base 16: mod_base = OTHER; note = 2'O-methyl-adenosine
  modified_base 17: mod_base = um
  modified_base 18: mod_base = gm
  modified_base 19: mod_base = um
  modified_base 20: mod_base = OTHER; note = 2'O-methyl-adenosine
  modified_base 21: mod_base = um
aaacttgaatttcctatgtat

SEQ ID NO: 483 - RNA, 21 nt, synthetic construct
  misc_feature 1..21: note = Description of sequence: B4GALT1 siRNA sense strands , modified; Sense strand IDETXS2405; Based on: SEQ ID NO: 460
  source 1..21: mol_type = other RNA
  modified_base 1^2: mod_base = OTHER; note = phosphorothioate linkage
  modified_base 2^3: mod_base = OTHER; note = phosphorothioate linkage
  modified_base 1: mod_base = cm
  modified_base 2: mod_base = um
  modified_base 3: mod_base = um
  modified_base 4: mod_base = gm
  modified_base 5: mod_base = OTHER; note = 2'O-methyl-adenosine
  modified_base 6: mod_base = OTHER; note = 2'O-methyl-adenosine
  modified_base 7: mod_base = OTHER; note = 2'Fluoro-uridine
  modified_base 8: mod_base = um
  modified_base 9: mod_base = OTHER; note = 2'Fluoro-uridine
  modified_base 10: mod_base = OTHER; note = 2'Fluoro-cytidine
  modified_base 11: mod_base = OTHER; note = 2'Fluoro-cytidine
  modified_base 12: mod_base = OTHER; note = 2'Fluoro-uridine
  modified_base 13: mod_base = OTHER; note = 2'O-methyl-adenosine
  modified_base 14: mod_base = um
  modified_base 15: mod_base = gm
  modified_base 16: mod_base = um
  modified_base 17: mod_base = OTHER; note = 2'O-methyl-adenosine
  modified_base 18: mod_base = um
  modified_base 19: mod_base = um
  modified_base 20: mod_base = um
  modified_base 21: mod_base = um
cttgaatttcctatgtatttt

SEQ ID NO: 484 - RNA, 21 nt, synthetic construct
  misc_feature 1..21: note = Description of sequence: B4GALT1 siRNA sense strands , modified; Sense strand IDETXS2407; Based on: SEQ ID NO: 460
  source 1..21: mol_type = other RNA
  modified_base 1^2: mod_base = OTHER; note = phosphorothioate linkage
  modified_base 2^3: mod_base = OTHER; note = phosphorothioate linkage
  modified_base 1: mod_base = cm
  modified_base 2: mod_base = um
  modified_base 3: mod_base = um
  modified_base 4: mod_base = gm
  modified_base 5: mod_base = OTHER; note = 2'O-methyl-adenosine
  modified_base 6: mod_base = OTHER; note = 2'O-methyl-adenosine
  modified_base 7: mod_base = um
  modified_base 8: mod_base = um
  modified_base 9: mod_base = OTHER; note = 2'Fluoro-uridine
  modified_base 10: mod_base = OTHER; note = 2'Fluoro-cytidine
  modified_base 11: mod_base = OTHER; note = 2'Fluoro-cytidine
  modified_base 12: mod_base = um
  modified_base 13: mod_base = OTHER; note = 2'O-methyl-adenosine
  modified_base 14: mod_base = um
  modified_base 15: mod_base = gm
  modified_base 16: mod_base = um
  modified_base 17: mod_base = OTHER; note = 2'O-methyl-adenosine
  modified_base 18: mod_base = um
  modified_base 19: mod_base = um
  modified_base 20: mod_base = um
  modified_base 21: mod_base = um
cttgaatttcctatgtatttt

SEQ ID NO: 485 - DNA, 63718 bp, Homo sapiens
  misc_feature 1..63718: note = Description of sequence: B4GALT1 gene
  source 1..63718: mol_type = genomic DNA
gaggcatgaagaaataattgtgcatgactgaggactttccagacctcccctttccttccaccagttacttactaatctcagaatccaccccccaaaatttttctgataaaaacactaccttaaagccagcccagggagacttgagccagcccagggagacctaaagtcaccacagggagatttcagctggactcttctatctccttgttggcctacctgcagtacaaagcttttcttttctcaaaaaccaggtgtcacagtattggtttctagaacattgggcagtgagtgcttttgcgctttggtcggtaacacctggatctgatttagacaatactttggacctgaagtcttaattagttgaacttttgggggattttaagaagacactaatgtattttacctgtgagaagaatctaaataatctgtggccattgggcaaactactgtggaataaaggtgcctgacaattctttgtccctcctcccatcaagaggtggagtcagccaggtgaaatggctcatgctggtaatctcagcactttgggaggccaaagcaggaagactgcgtgagctcaggagttcgagactagcctgagcaatatcgcaacatctcatctctactaaaaattttaaaattagctggacgtggaggcgcatcccggtagtcccagctactcgggaggctgaggcaggagaatcacttgagcccaggagtttgacgttatagtgacctatgatcacaccactgcactacaggctggttgataaaggaagatcctgtctaaaaaaaaaagtaaaaacaagaggccgagccagttttattccccttgaatctggcctgccctataaacttgttttaagcaaaagaatgctttagaagtgatgctaaggctgggctttcagggatctccatcttctgtatttttgaaatgctcctttttggaatgcttcctctagtttgtgaggaaacccaagcagccacatggagagtcctttgtggagagatccaagtggagaatgaaggccccatgacccaacccattctgagtttccagcccccagacagccccaactgccattcacatgagtgaagccattttggaacttccaactgtgccagtgcctcagctgacaccatgtgaggcaaagctgcccagccaactgcaaaactgcgagaaattgttgcttcaaaacagtaagttttggggtaggtgttacgctgcaatagatgactgaaataactgtctaccatgtgccgggcactatttgatgcccttctgatccatgagggtaaaaacagaaatgtaacctggcaggtgcagaagagggcgccataggagggcagaggaaggccagctgcagggagaagcagggagctggtgattctgggcagatgagcacatggatgggccaacggccaagcccccatgccagcttttggccaatcagcactgcaacttcctcctgcatttgtctcgccggatgggattaatttttcacctgacgaagtagagagtggaaaagagctggagacagtggggagaaaggttgcctgggtctgtctcactagcaccagttaatgtctggactgctggacaatgttgtcccaaaggtttctgggccatctgtattatttgtaattgactgcttctaggtgcctgtggatcaggggcagctgagactagtgctcaggcctcagtggactctgcaagttcctgagggataggcaatcagcaagtgttgttccttttcctcgatttctggccacgtgtgtcctgggacaggtctgtgattcttaataacccccgcagtcctgtctcctggctatcatctataccaatggaagacacatccccatttccccctccacttaattttcagttgcaggactaatctgacccaccctcactcattggccaggccgactttacccctagacacaggatgctggggtcagcttcacctttaccaactccttggagaactccactttacgttctaaactaagttagcaataatttttcccttctctccttcccacatcattaagatgatcacagtatttaaaaagtattttaacaaatatcggccgggcacggtggctcacaactgtaatcccagcactttgggaggccgaggcaggcagatcacgaggtcaaaagattgagaccattctggataacacggtgaaaccccatctctactaaaaatacaaacaaattagccgggcatggtggcaggcacctgtagtcccagctacttgggaggctgaggcaggagaatggcgtgaacccaggaggcagagcttgcagtgagccaagatcacgccactgcactccagcctgggtgacagagtgagactccgtctcaaaaaaaaaaaaaaaaaaatctaggggctgaagatacagtagtgaacaagagagaaatttcctgttctcatgaagctgattttctaatgagggaggcaagacaacagaaaataaatgcataatgttgggtagttgatatccactctgaaaaaaatcaagcaggttaaggccgggcgcggtggctcacgcctgtaatcccagcactttgggaggccgaggcgggcggatcacctgaggtcaggagtttgaaaccagcctggccaacatggtgaaatccgtctctactaaaaacacaaaaaattagcccggcgtgatggcaggcacctgtaatcccagctactcaagaggctgaggcaggagaatcgcttgaacccgggaggcagaggttgcagtgaggtgagattgcaccattgcactccaacctgggggacaaaagcaagactttgtctcaaaaaaaaaaaaaaaaaaattcaagcagtttaagcagatttgggcaggaggccattctgcataaggtagtctgaaaaggtctctgtcataaggtgacatttaagagacctgaattgaatgaaatattggggacaagtgtttcaggctaaatgaacagcaagtacaaaggccctgaggcaggaagaaatatggcaagttcaaggaatagctatcaggctagtgtggctaaggcaggtccagcatggtagagtgacagatgtgggtggggagggaaataggaaccagattgaacagggtttctgtggatttggttctgaacaaaatggcatgatctgatttatgcttacaaagatttcctggatgctctgtggaaaacagactagggaggaggaatggaggaggtggaagcagggtgaccaattagtagctgccatataacccagggcaagatgatggtggcttgatcgaggatggttacatcagagttggctggtggtgaattttgatgttttgaaggtagcactgacaaagctggctgagggcttgcaaatggcattgagagcaagagaagcacatcaaggacaccttttagattctggggaactgaataaacaatagtatcactctctgagggaggtaagaacgggagtggtgtgtaaggagtaggttgctgagggcaagatgtattgtgtttgagatgccagtaaaataagcagttgaatctggaggtcagggaagagatctgggctggagacaaatcagtgatcagcatttggatattataaatcattccgaggcagtaagtgtagacacaaaagaacatcatggactatggctggggccttcagcaactggggaagaagtccagagaggagacagaaatggccagtgaagtgaggaagatcagaaggacctggtgtccaggaagtcaagtgaggaaagttgattctgtatgatcacaaccaaagtgtcaactcataagccttattttctcatctgtgaaatggacaccgtaacaccacctacttcatggcagatagtactggcacacagcaaactctcaaaataaggtagctactgttattccctgatggttggctgccagagccctcaacttccctatccacattactgacagcacctccatgagtctttctctggggtgaggtgtctctgctcactcagggcctgaggcctctgggtcaaatcgaggtcaagtggcttcagtgcctaagtctctcacccacacagccttcagcccttacttgcaaatcaacaaagggtaaacctgtagaaaacatgggtttcggagccagaattctgcctcttgccagctgtgggctcttaggaaagtttcttaatctgccggggccccactctacgacatggggagaactgctacttcatgggacagtgggtagcccagtgtagactgtaacgccggctgatctcctgcacgctggcctgggagttagaggcttcttgctgctctcctcttcaaagtatacaggactcccgccacacacacatctggaaccaagctggtctgagagccccttatagcccaggctacctgatggggaggcacagaagtggcaacccgtccactttctttgccgcaggaccccccgttaagcagcggggtccagccgggctgagttagggagggggtttcgaacgtgccactcctcgcccggcgtcgaagcccgtttcctgggtaacctttttctgcctctcttcctagcccaccaaggcccactggccagaacgccgccgcggccccaaaccactccagataaccacccgccagctgtcctctccgttctctccgccgccgcgctgcaggcccaggctcgcacccgagtcccttcgcaccccaggaagtggcgcggcctgtcgagggcagcgtggaggaggaagaggaggcgcggctcaacgcgaccgaagctccgccgcaaaggctcgggaggaagagggcggtgcgcggccaagcgtcggagctgcagtcatactccggggaccccacgacggcgccccgcccgctgcccaccctcccgaggccccgcccagcgcgcccatcccgccacgggctgccccgccttcccgccctcgtccagaaaaccccgcgcccggccccgcccccgccttcgccggggccccgcccctcccctctccgccggcgcctcgggcggcttctcgccgctcccaggtctggctggctggaggagtctcagctctcagccgctcgcccgcccccgctccgggccctcccctagtcgccgctgtggggcagcgcctggcgggcggcccgcgggcgggtcgcctcccctcctgtagcccacacccttcttaaagcggcggcgggaagatgaggcttcgggagccgctcctgagcggcagcgccgcgatgccaggcgcgtccctacagcgggcctgccgcctgctcgtggccgtctgcgctctgcaccttggcgtcaccctcgtttactacctggctggccgcgacctgagccgcctgccccaactggtcggagtctccacaccgctgcagggcggctcgaacagtgccgccgccatcgggcagtcctccggggagctccggaccggaggggcccggccgccgcctcctctaggcgcctcctcccagccgcgcccgggtggcgactccagcccagtcgtggattctggccctggccccgctagcaacttgacctcggtcccagtgccccacaccaccgcactgtcgctgcccgcctgccctgaggagtccccgctgcttggtaaggactcgggtcggcgccagtcggaggattgggacccccccggatttccccgacagggtcccccagacattccctcaggctggctcttctacgacagccagcctccctcttctggatcagagttttaaatcccagacagaggcttgggactggatgggagagaaggtttgcgaggtgggtccctggggagtcctgttggaggcgtggggccgggaccgcacagggaagtcccgaggcccctctagccccagaaccagagaaggccttggagacttccctgctgtggcccgaggctcaggaagttttggagtttgggtctgcttagggcttcgagcagccttgcactgagaactctggtagggacctcgagtaatccactcccttttggggactgacgtgaggctcccggtggggaaggagactgacctctcggttcacgtgtcttgccatagagccactctcctgagtgggtttttctcctgatcgtttgggccaagtgacttctctctgaacctcatatttctcttctgggataataaatggtcaccctttcaaggggttgttttggaagatattgtgaacaatggtaaataagggcttaattaatgagggtaagccctcagtaaattgtcactgtgtgttcatttcttcctctgtgtggatcgtgaccgagagcccttccccctagcctcctcctggtatgggtacccaaaacctaggtgagcagggatctctcccaggggcagagagcttgtgtactctgggtgttagagggctaaaatataaccagtcaacaccacgttgcccatttctggtacttccggtagcagcctgagtctcaattatcttgcccagatgatctgaactctgacctctagcctgtttcagcataggcagagagcttgagtaggtgagtttgcattcctcatagcagctggctgagcctagtctggacttctctttgacctgtaacctacaggcccacaggcccaaggcaaccacaggttgcttccagggttaccacacaggtggtttctcatttctaatgctaggttttagataattgttgtaagtgaggggccctggcaggcaggatgacatcctgccaataggagttttctgtcactttcccacagagccctggctactacatactcttgctcaatttcgccagtaattgcgtcaatgtgttcatatcaagtttgggaagaacatcttggaattggtcagacgtgaactgtggtaataatgggggcttgtttttttaagcagataattaaattcctttgcatttgatgattattctgggaagcagactagtcccataaaatgaaatggactctgccttgctgctaagtgtctgacttgagacatgctatcgagtttctcaaaatctcttccttgtgtaaaatgtggttgtcgatgattaccttacaggggtttttttaagactaaatgagatcgtgtacattaaatacaggcactcaggctgggcatggtggctcacgcctgtaatcctagcactttgggaggctgaggggagtggatcacttgaggttaggagtttgagaccagcctggccaatatggtgaaacaccatcccatctctacaaaaatacaaaaaagttagccaggggtggtggcatcgcagctactcaggaggccgaggcaggagaattgcttgaacctgggaggcagaggttgcagtgagtcaagattgtgccagtacactccagcctgggcgacgaagcaagactgtctaaaaaaaaaaaaaaaaaaaaaaatacgggcactcaatacaccgtataataataatatagtaataatatttgcttaggatctttaaaaagtttcattttttcagactcccacagaaatggctctgcacagcagagtgaagggggagagagactgagtctccaggccagaaaaaggccaggttttttgcttttgtttttagttgttgcctggatattgcacagaaagaaaaaataattagcaagttaaacaaaagtaccgcaaagttgattacattggtatttgagtatcacatcttctctcagaagcgtaagagacaaggtcgtgaccatacctctgcttagttttgttttgtaatggtgttgctagtgatcggcttgtcaccagttactggtgtttctaaatggactataattggctacttgaaaggacttcctgagaaagaacattttggaggacgaggagagagtgccttctctattttggctgctttcatgtgacatgcaagagaccatgacgtttaggctgctgctgaggcagccccagaaatgggggccgagaggtcttttcttcattttaatagggtctgtaggtttgggtggttaggtacagttctcagaatggaggttcctggctatgaggccttgagaaagctgaaagtctccttgggagtgtgtgggtggggggagtcgagcccatctgttcatgggcaggtgtcagccaaagcccttgcgggtggttttgaggttggtgggagaaagcatccgtggggtttagagttgtggccttttcactacttgcagttcctttccccgacttggctttactttctggtgtccaggggtctgggccagatgctgagattcctctcagctgacaggtgtgggttatgggcaaacccttccctggaggacataaggcaccggattggactgctgatgggttgctgttggagttgtcagggccttggaatagtcttcagatagacttgggttagtgtgacctggggcaggctgcaggtttggagccatagtaccccccgcccccacaccgggcaccctgctctgggctaatgtgaggcttgcaggagtgagtgatgcagtgggaaggggggcctttcctgaggattctacagctttctccagggaatcctcccaggtagtttaggcctgcaggtgctatgctatccttctttcctaaccctgtctcaggtcctcagcggggccatgcggcatccacttataaccctgcagcgaggccctcttttctggccacctgggtgtttgcctgctgagatgggaggaacagtggccttgggcttcttcccccgtcatgtttatctctgctcagattgggcagcagctcaatgggacttgaccagctgtggcactgccagtctgaagatgagtagggtgatggggggaggtgggcagtacctgaagctgaactggtgagagaggcaggctggcctgggggctcagctggggcctgggatggttggtacagtcccctcaggggggtaggggagtgagtgttagactgcttaagcctcagaggccgctcttgcccacctatgctttgaggagatcctcttcatttgttcaaagggaagactctgatctagagatgggcacttggaccagcaaacagcagctacaggtagccagggcacccgaggagcacttgctcatgagccggtttccctggtttttatgggggctgttgctgagcgtctgccagggtttgtgtcctagcacttgctggtctttgctgggctctcagctctcaggtgtttctctaccagcacgtttccccctccctcatatgcacacatgtggacacaagcaggctgcccaggacagagtgtactttgaggcttgggaaaggactctctctcgcccttttggggatgagccttggaacctcatcaccttccggcttggggtggagcttcatcctgggggttgaagctttaggctcagataactagtcttgtaagccagttttgtcctgttgtttttttcgtggaaaataatgtattgacgtatacacagacattctttgtctaacagtctgagattgagaaataccctccatgactatttggtttgctttcatggtgaaacttggtcgctttcttagacacagcctatggcaataagagtgatccctggctgctgtaattcattccagactttgagcaaacacaaggcaccgcctccacctgcagtggagcctctgatgaaccaaatggaaactccttggggaatggggagtaagagccaaatgtgggattggacttaaactgcagcttcttagaactgtagcattccacgatgggattgtctagtgctcttcctggaggttactattcaatagttggctagtgcacaggttcaggggtgacctgatatgccctagcgtttcagaagatccctgcaaggtgtgtcttttggtccatctgaagggtcttgtatggtgatcttgtatggatatccgtgacggctaaggcatctgataacttcattccttcagttccagcagtgttcctgtattatgctgggcactagagctacaaagaagaaaacaaagtgcctcctcttcaggaactcttaatttaggcaggggaggcataattgaacagtgctgaggtcatctaggggaaccaaagtgtgtatttatccccttccctatcactcccctccctccttcatttcttcctttcttctttcagaaactccaagttcatatcaaaattctccagccctggttttatttggttgtgtgaaaattttcctctaatttctgaagctatgcattagttctgctgagtaatctttaacttgctgctttataatgattataatgagatatcactgggtattatggtctttgggtagcagcagggtagggatttccaggctgggactaagctaatttatgggttgggaattatggggcagttaatagcaaggcagtccaagctttccacagattccaccctagggaccatccagacttaaggaacagggccggcaggctcatcccctttgcactcagctgggctatgggtgtgtgtttgtgaaagaggtttattcagtagtcatacctgctgatttccctgctatctgtttacccagtgcctcctgtaccttgtttcttactctttgttctctgctcttactatgaagaagcagagactggaattctgcttgaacccacatctacctggaaattccagtttttcttgtccagtggagcagcaatccagttgttttaggacaaatggtctgcccttgaagcttaaatcctttgagggcctggcatggtgacagttttacatttggctttggtatagactggtgtggtccctgggcagtgaggtcactgtaaggccagccagccagaccctggctcctaggggaattaacaaggcatgggattagactcacagggtccctcctgtccctaaacttggtaggggttcctgggagccagactgcgattaagattgtagagacctgagacctgagttgtaggggcctctgtgttgatctgggccattgccgggtgagctgaggcggtcactagctcaaggagtgatctcaggatattgttctgtaagtcagagacctccaggttggagagtggggcttgggggtgggggacagggtttagtggggagctggttctgggtgaatgtggcctaaagggatttgtccttagaagacagaggggtgagtcacacactcagtgcttcaggttccactttgcggcttggcctcagcccgccccttccctgcacaaatgaaggccaggggctatataattggctgttgctgaattctttggcagtgattttaaagtctggtctgggtgtgttatgtagctgcttctctatccactccccacacccgctgcttctccagagcccctcacaaagcccaggcagagagagagagagagagagagagaatgacttgcctcacagagatgttggggatagggataggggtatgggtctttgcttttgccttttgaggggggataatctcttccttcattttaaaagtaaaaagtaatgcaggctcattgaaaataatttgaaaagttgaaagagatataaaagcacacccaaattcctatcacccaaaagaaacataccggcatatttcctactagtctttttcatgtttaagaatatagctgatatatttttttttctttttctttttgagacagggtttttgctctgtcacccaggctggagtgcagtgatcacggctcactgcagcctcgacctctcgggctaagcgattctcccacttcagtctcccgagttgctgggaccacaggtgcacaccgccatgcctgactaatttttgtattttttgtagagatggggttttgccatgttgcctaggctggtctcgaactccagagctcaagtgattcacctgccttggcctcccaaagcgctgggattataggtgtcagtcaccacacccagtgttatagctgttgtctttatagatgaacagatagattgacatagattcatgtagatagcctggtgttcagcatttttcatttaagattctgtcacagacttgaccctatacctttaaaaatcacaaaggcagtatcatagtctgtcagctgaatatgccataacttaaaaaaatcattcaactgttgctgaacacacacatatacatatatagtttttgttttttcttagtgatgtagtgatgcttgtgcagaaagctttatgtactttttggatggtttctgtaggagagctttctaaaaaaggaaaaaaagtgttgaatgttttttgagaagggctagattttcaagccagtcttacaaaaggatagactcattggaaattccagatttgcttagtgctggcagatgagtatcacttattgctgaacaatgtgtctagaattctgattaaaaaagaaactaggtccaggaagtgcctgggggcaggggcaaagggccaggctgcaggataggctcttaggatctggctgagcagaaatctgctgtgaacagaatcggtgggggtgatgctttctcagtaacttctccatttgtttctttagcagctaagtccctgtgctggacttctgtggactactgtggctctggggctgtggttgtgggtgaacaacagctagctaaaccagtgctgttgacatcattgagatgtgacgcacaggaaggtgggagcaagcttgcaaatcagattctgaaacatatagcacagctctcccacctccaggtggtcctgagatctagggaggagccatagtgagaaactttaggtttctaggaattctcttagggagaagctctcttagggagaggcagaacctggttctcagttggggctgattcaggtgggttagatcaataaagcctcaggccagtgtgccaggctattcccaaggagtatactttgaagttactccctttagaatgtcctcagtggagataaattctctctgaggagcagttttgtctgccggggtcatttggcacaaagcctggagtgctagggcgaggttgcactgagggaaggggcaggattatgtcagcagtgtgacggatacagtgtgaggtcaggctccttcctgccccaccacgggggcctagaggtcatggggagggtccctggcaggggattcaatcattgcttggccccatgacagagtatattctaaaaatgccttaagtttttttctttcaaagtttcttcctgttttgcataatggccttttgcctttgacatcctgaaaccgcagagctgtcattggtgttgcaggacactgccagcttgaaaaaaatcaacaacaaaaaaagaaacaggaaaggatgtggagttcagggtgcggcctagggaagctggtatttgcgttatgggattgtggggatgtggtattaaggtgttgggtagcgcctgacatttagaggagtactctgggcagagtccctgcctgcccaagaataggtagaattgagtcttcacaccaaagtcaggagagaccccctccccccaggaagagaatgaacagggactcatttcctcattcagcaaacttttattggtaactacactatatgaagtgtgagagatagacatgaacaagagaggcccccactcttgggcagtcccttagtagtagtagatagactctggcaatatggtgtggtcagagagaggaagcctgggtgctttgagggtactgaggaggtgcagggagccaaatgggtggtctgggccagggccagagtcagaatgaaggacctctcttccagacgttgattttagcatctctgtctctcagtatgtttgaacagtctcccttattggaagggcaggagtctactgctaaaagtaacctgcgatttcctctacttgctgtcatgtggaaagaatactaaagctgaaattccaaaagttgcacacctttaccagcagggcaggagaggaaaggaaatggaggcagagtgagctgaagatgataaaagaaagagaaggtggtgcagtttggactgttatggacagaggaagtctgagggtagctggactgagggatcaaagggaggcagttgaaagggaagagagctgcagagagggatttcttggtctgcagagggtaggagcaagccttgaaggctgctggagtgaggattccgagccctggtctttattctttttctaattcattacatcattttaggcaagtcctaactcctttggtctctgttgtctttctgaaatttgagtgggctgggcctgctggtctttagcctctgtctttctctacctcctagattccagtttggcgagtgggggggaaaacctggttgtatatgcaacgtgaaaggcctctggaattccttttgaagctcactacccatgaggcttctgctaaggatttcatcatgtctgtctaagcagacataaaaattttagcaggtggatgacccgtagaaatggcacaaggaatgtttctttctgtcacactgtggtatttgatttaagaaagttgttatcctctctgtgcctcagtgttctcacttgtaaaatggcaataacagtatccacctcatagatgttatgaaatacaggtagtagccacgaaagggcttaaaacagtgcctaacacagaataagttgtgaatatatgttatttattattggtagtataatgcttatttgtgaagattttggcttttgctttataggaccttttttttttttagttgaaaatacaatgttaccatgttaaatgttaaaaaaaattctacttaccattgtaacagaacatgctcccacttctgtaacagagcttgctattacttttcaaatgcatacatattccaatgcatatattccaatgcagttgtagagtgaaactgtttgcatgcagccatttttatccaacattatcttataaaatgttatgttgtttatgattatcctaattatcttttgttgctgtctagtatccttatagatattccattagcatacactattccaggtttcactatcgtcgataatctagatatgaacatttttgtagtgtgtagctctttgcttcagttgaattactttcctgggataaattcctggggaagaatttctaggccagaggatatggtcatcttgacaatactgattcacattgctgcattgctttccaagaggtttggaatcattcacaggttctaaattggaaaatcctggcttttgaagtatgtggattctaagggcgatttggatctagctggagcctcacactgacacttccagccagtgtgtgtgtgtgtgtgtgtgtgtgtgtgtgtgtgtgtagttccctatgctggacaccgtgtgtgtgtgtgtgtgtgtgtgtgtgtgtgtgtgtgtagttccctatgctggacaccatgtggcctttctggacattagggttttcctgtgattgcctcagagcagttcctgttgaattcactctgtgtccacaaaaggagccttactgtggctctttcaacacccacctacctttgccaagttggtttacagaaagtaagaacattctttccttcttccttgatatgtggcgctaaacctatagcatggggcaggctctggctttaaaaacctgacttaaaaataatggtgttgatcaaaaagtttgtggatcagtttttggaaacactgcatgtagccatccatagaaacttatattctgttgggctagcctgggcgcctgatcatttaactcatgtggatgaacttctatgtaatagccctggtgtatgggatccagaaacagggccctaatgaagaaaggcttttaaattatgttggataaaaataagttgttacaatagcccaaagtctgcaaatatgaattgccagttctgtccttgtagtcatccaccatgtgcctgcatcttttgtagactcttgtagattcagaagcccactgaattgcataaatgatggaatgattttagacttagtgatttcagtgactaaaagtttacagatcctggccgggcacagtggctcacacccgtattcccagcactttgggaggccgaggtgggtggatcacctgaggtcaggagtttgagaccagcctggccaacatggtgaaaccttgtctctactaaaaatacaaaaattagccgggtgtggtggcatgcacctgttgtcccagctacttgggaggctgaggtgggagaatggcttgaacctgggaggcggaggttgcagtgagcccacatcaggccactgcactccagcctgggtgacagagtgagactctgtctccacctcccccgccccccgaaaaaaaaaaaagtttacagatccagcagatggggcatattcaatttgtgacagccactcccttcaccttatagctatgtcatatgtcttcttctcctttgactgcattctgcagcagtcagttgtgacttaatatggcactctgggcccactgaattaggtcagagctgctagtagtatattgttcctagagacctagggcaagattttcttactacataaaatgagggagataatttcttacctcaagatgttggtaagaggagtgaatgaggttagttatatggtaatatcagtactctgaatgtcttttgatcaatgcctaactcatcttcttgggcacaaaaggcatacagtcagcacccttaggccacatataaaattcctccaaatgcaggttttcatctgccttggggcagagtcaagagaaagaagaggaagaggcgtgaggctctgaccacaacttagggacagaatatagcccaaagcgagtaccccaggccacaaggagaaggccgctatcttgttgaatccacagcactggaaacttggagtgtgtgttcccctgtgtcagttacactggaattttatggctgctcacattcttcccttcaggtggacgttgttcatcagtatcctgggcaagaggccatcataaaccacagacagctgagtgattaggaagaggagctgaagagggagcattagatgtttgattgagtcttaggtgagaaagtatatcattaaaacaaaaagatagatgtaggcgggctcagtcttgtgtgcctggtgtgttggtagaaaaactaaagcacaagcctgtagataacctgctttattctacctcggggctggtgttggaatccaggatgccagaccctaaagtccagctctctttccaacctactgaataatccgagagaaatcatgttctctctctgggcctcagtttgcccatgtataaaatgagatgaaggattggctgggatgctctccagagtctcttcctgcctggagttctgacgtagccatgtactcctgctcagcatcgctaaatggctttgtggtaggaccattgagtgctgcctccattagggccagctatgtaatgctggggtggctgtcactgggccctaagagccaggattggtcttactggagaaatccacatccacctaaacttaagacccaggggtgtccaatcttttggcttccccaggccacactggaagaagaattgtcttggaccgcatataaaatacactaattatagccgatgaggttaaaaaaaaaaaactcaatattttaagagagttcatgaatttgtgttgagctgcattcaaagccatcctggccgcatgtggcccatgggccatcggttggacatgcttgctttagacctcccagcaattctagtctctaaacaggaaatcaaaagtcaagatgaatagataagttggtcagtgtgaaaaagtaattggtgggagccactgtagatgcagggttctaggctccatcaacaaccacctacatcactgaacgaaagataatgcttgttcagcacttattacatgccaaccatggtaaaaatacttcagatgcattgttttcatgaactctcacagcagctctttttcttgcctaaatgccccgttagaacctccagtacaatgttaaatagatatgctaagagacaacatatgtgtcttgttagggggaaaatatccagtctttgactattaagaatggtgttagcagtgggtttttcctaggtgccctttatcaggttgaggaagttcctttctattcctggtttgttgagtatttttatcatgaaaaggtgatgggttttgtcaaatgcttttctgtgtctgttgagatgatcatgtttttttgtcatttattctattgatatggtatattatacattgatttttcagatattaatcttgcatacctgggataaatcccacttggtcatggtgtataattctttttatttgttgctggattgagtttgctagtattttgttgatttgtattcataacagatagtggtctgtagtctttccctccctccctccctccctccctccctcccttccttccttcctctctctctctctctctcccctcccctcccttcttttcccctcctctcccctccccttccctttcttctctttcatagttgtttaccactgtcagaaaaggtctgttcgttttctttcgtcgtgagatctttgtttggttttggtatcagggtaatactgcctcaaaaaatgagtagggaagtgttccttcctcttctgtattttgagagagtttgtggtcggtttttattaattcttctttaaatatctggtagcgttcaccagtaaagccatctgggcctgatgttttctttgtggaaaactttttgattcctaattcagtttctggttataggtctattcagaccttctattttttcttaagtcagttttgatagtttgtgtcttccaaggagtttgcttcatctaagtcatctaatttgttggcatacatttcatagtgattccttatgatcctttttatttccgttaaagttggtgtagggatagtccctctttcattactgattataataatttgaattttctttttttcttagtcttgccaaaagcttgtcatttttattgatcttttcagaggaccaactttgagttcattatttgttctctttgttcttatttttctgcttcattaacttctctaatctttattctttcattctgcttgcttttggttaagtttgctttttctggtgtcttaaggtagaaggttaggttactgatttgagatttaaagatcatgctctttaaacgttttgatagatactgtcagtttgccctctggctttttctcattaacagtgtataggagtgcttattcctcacactcataccagccctgggtgttactaacctttatatatttgccagtatcatattcagacatagtatcttgttttaatatgtttctctgattactgatgaagttaagcaaattttcacgtgtttattggccatctgtctttcttttttcatcctttctttcaagatgggagtctttgccatgttgcccaggctggactcgaactcctgggctcaaatgatcttcctgcctcagcctcctgagtagctgggactataggcgtgagccaccatggctggcttgcccatttgtatttcttatgtgagtattttttctttttttttgaagtggagtctcactccatcccccagagtggagtgcagttgtccgatcttggctcactgcaaccaccgcctcccaggttcaagtgattctcacaccttagcctcccaagtatctgggactataggtgtgtgccaccacacctggctaatatttgtatttttagcagagatggggtttcaccatgttggccaggctggtttcaaactggcctcaagtgattcacctgcctcggcctcccaaagtgctgggattacaggtgtgagccactgtgcccagctgactttttttttcttttttttaacccttttttttttttaccctttttttggcccatttttttttaccctttttcttttaacccatttttctattagttttaaaaatatgtttgcaggagctttttatattgtggatttttcttgtttattacatatcatttgtaaatatggtctctccatctgtcactcttctttatctctggtttctttagctatgtagaagttgttatgttatgttatgttatgttatgttatgttatgttatgttatgttatgttatgttattttttggagagggagtcttgctctgtcgcccaggctggagtgcagtggtgaaatctcggctcactgcaacctctgcctcctgggttcaagcgattctcctgcctcagcttcccgagaagctgtgattacaggcacccgccaccacacccagctaatttttgtgttttagtagagacggggtttcactatgtaggtcaagctgatctcaaactcctgatctcaaatgatcctcccaaagtgctggggttacaggcgtgagccactgcactcggccagaagttttgaatttttatgtgtttaaatctatgttttcctttatgacttcaggttgctttcatacttaagcaggtcttcaccatcccaaaatgataaaatttttctcctgagttttcttctaagttggttctttagaagccaccaacttggcttcgacagcaaaagatgaacagaatttctgttcaactctcatgctgcaagaagctttatgtaatactccagggaccctttaaggtcccagagttttcctccaaatctatcagtgattctagtggctaagagtagaaatgtgaaaatttagccatgtgtgctgatagagctgtagtaatttgtaagctctgaagttctaaggagtcaggggagaagggaaagtaacatttattgaacatctattagctcaataagaacatgcgataagtatgtatatgtattatttcacttacatctgaaaggaaggcataattatccccactccttagagaaggaaattggagctggctacatttaaagtagtcctgacaccagagagatattgccaggagtacttggctggctgagtgcccagatggcccataggagtagtgggccctccacagtccaaggtctggttctaggtggagagagaaggatgtgctcgtagtcagcaccgcagctccagaaaatctgctggggctccaaaactgattagaggggcagctgactcagtaataaaactcccaggagacttacttacatactggaatgcaaagttgcagctttactgggaagattagaactgttattgagtagcttagaaatctctggctgaattcactgcaagggaagccgcaggataagctaactgctggtgagtcagcagtcagagcagggaagtgaatttaacattagatgggtcagtctctcgtggctgatgaattcatccccacaatactgtacacctgccttagggacctttgtctggactaggggttggggtccccctcctttgtacagccctggaaggacacatccagctccatccgccatctctcccttacttatttccttccttccttccttctttccatccagccatcaagcttcctttcatggccaataatcatcattggggtctactcatggactctcttgcctcatgtatttgttttattttgtcctcattcccacttctatttcccaggtatatcacaggcaactattctaacgtatttatagtttgtgtatctgtttttgctcttgccaaaatggaagccactgctttatacatagatgtattcttaactttaaaaaaaatttttttagattaacctacaataaaattggctttttggcatatagtctataaattttaacacatacatatttttgtgtatctaccaccacaatcaggatacagaacagttccatcaccccaaaaaaatccctcttgtagtcacattctcctcccacccttaatcccaggcaaccactgatctattcttcattactattgttttgtctttttgaggatgtcacataaatggagtcacacagtatatatacatttttttaaacatatgtaaatggcattttatagctcattttgattatatgtttttcatccagttctgttttttttttttatttttaaaaagtttgacataacttcagacttacagaaaagttgttagactaatacaaagaattcctggatatcctttggagtccctaaatgttaacattttactatatttactttttccttctctctctctctctctctcgctctgtgtgtgtgtgtgtgtgtgtgtgtgtgtgtgtatctacctgtagatagatagatattaatataattttagatagatgtatctagatctctctctctcatatatatgtgtgtgtgtatatatctatatctatatctatatatatctccttttacccttaaatattcagtgtatatttcctaacaacaaggtgatttaaaaatatatatataaacatagtataattaacaatcaggacatcaacattgaaacatttctgctatgtcatctacaggccttaggaagactttgtcaggtgccccaataatagccttgatggtagaagaaaaccatgtgttgtattcagttgtcatgtctcttagtgtcttgtaatctgaaataattcccaagccctttggatttcatgacagtgacattgttgaagagtacaggccagttattttgtagaaggtctctcagtttaggtctgtctgatgtttcctcctgatcagattcaggttattcacttttgacaggaataccactgaaatgatgctgagttcttctcagtgtaacgagatctagagacacacactgtcagtttgttccttattggcagtgtgaaccttgaggatttcattgtagtggcatttggcattactccattatagttactattttaccattttaaattaaaactatctggccgggcgtagtagctcatgtctgtaatcccagcactttaggaggctgaggcgggcaaattgcttgaggtcagaagtttgaaaccatcctagccaacataacatggtgaaacgccatctctataaaaaatacaaaaaattagcctggcgtggtggcgcatttgtagttccagctactcaggaggctgaggcacaaggcttgcttgagcctgggaggcggaggttgcagtgagctgaaatcacgccactgcactctagccagggtgacagagtgagactctgtctcaaaaaaaaaaagtaaataaataaaaaaattttttaagtatcttatgggcatatacttgtcctgttactcctcaaactttcatccacttttttttttttaaattttttttcttacctttcatcgttttcttgatatccactgggttttagcatctacaaatgattcttgcctgaatcagttattatggtagttgatggttttctaattccattattccttctatgtttgttaattttggcattcttctataaggaagagcttaccctttttccctattaattaattcatatattaatgcagacctatgcattcttacttcattaaatcataatcctttactatcattatgtattctgatgttcagactatcccagatttagccaataagatccccttcaggggaatggtctttgggattcctctttagaggttcctggttcctgttttcttttgacatatcctattactctttgagcatttttttttttttttttacttttaggcacagcaagaagttccatggtcctcttgttctttccccaactcagccctagagtcagtcacttctccaatgagctctagttccttttagtagagaatcataattagaaaacaagaatcagtgccaagtgtgcacctttgtttttaaggtccatccacgttgccgtgtatatgtccagcatgttgattctaactgctgaataatacctcatgattgtcatccatcccagtgtttctttttcccttctgtaatgagggactcctggactgcctccagcattaccttcacaaatattgctgtgaggaaaatccttaaacgtttcctttatgggcaacgtgtgagcatgtttatgttgattcaggggtgccagacacagctccagaatggctgcctcagtttacatttccaccagcagagcatgacaggctctgtgtctccgtgaataatcagcattaaccagcttcctattttttgccaaactaatagatgtgctaggataactctttgttttaacttgtttttctctgattaccaatgagctggagcatttcttcatatgcctgatggtctttgggattcctcttaggtaaattgcttattcattataatcctttgcctgtttttcactggagttcttatatttttcttgaagatatgcaggaattccttatacatcctagatattaatcccttcctggtctcagacattgcagatatcttctgaatctgttatttacttatttatttacaattttttttttaagagttggggttttgctctgtcacccagactggagtgcagtggtatgatcatgactcattgtggcctcgcaatcctgggcttaagcgatcctcccacctcagcctcctgagtagttgggactacaggtatgcaccaccagacttggctaattttattttattttttagagatggaagtcttaatatgttgctcaggccaatcttgaactcctggcctcaagcaatctttccacctcagcctcctgcatctattatatatatgttcactttgctcatgctgtattttgttgcaacataaaactatttttcccattgttttgtgcagtctctcaccagcactcttctttttctgtaactgtgttaatgccctttgttcttccatatgttaggtatgctggtatagttgaactctgctgactctcctcagtaaacagtctctttttatgacaccttatcctctactgaattctctctatcaagaatgacttggccgggcatgggggctcatgcctgtaatcccagcattctgggaggccgaggtgggcagatcacccgaggtcagaagttcaagaccagcccggccaacacggtgaaaccctgtctctatgaaaatacaaaaatcagctgggcgtggtggcaggtgcctgtaatcccagctacttgggaggctgaggcgggagaatcacttgaacctgagggggaggttgcagtaagccgggatggcacattgcactccagactgggtgatggagaaactccatctcagggggaaaaaaaaaaaaaaaaaaagaatgacttgtcttcctcttagagtgtgaggtctacatacaaatattattcttgtattcagcaaatgtatgtcataggcctagtgtgtgttaggaactgtgctgtcaccaacaaagtttagagaggttataaaacttgactgtagctttttagaggtggaggagtgatttgaaacctaggctgtaattccttcctcctgtgattccttcctactgtgttgccttcccttgaaaattgcatttgggggccaggtgtggtggctctcgcctgtaatcccagcactttgggaggctgaggcgggtggatcacctgaggtcaggagttcaagaccagcctggccaacatggcgaaaccccgtctttactaaaaatacaaaaattagctggatgtggtgtgtggtgacatgcacctatattcccaggtactcagtaggctgaggcaagagaatcacttgaacccaggaggcagaggctgcagtgagctgaaattgcaccactgcactccagcctgagtgacagagtgagactctgtctcaaaaaaaaaaaaaagaaaagaaagaaaattgcatttagttcctgtagactgtgtgtcaaatgtctaaatctcttctaacaaatggcctaaggaggtgcaaagcgaagcatcctcaccagcatcctgacttggcagtgaggcatgggaccctggagggagtagtggtaagtgtgactctggaattcttcctgggctacttgtcagtgactggctccagattgagaggagagcccagaggacacaggtggctgccccagcctggaggtgaaagtcttaaaataaaatgccagatgcctagaccattctaaacctttctgagaagctgaaatcatcccttctggaagcgctctagttctaaaaggacagatatacagcaagatcttcctggggctaatatggagtttataggcaagtaggcctcagaacctttccctggtagtgatatctgtgggcaggcacagtttccacactttccagaaattccagcggaaggagtgagaaggaggaatctgcccttgagtgaggaccaaagaaagcagaaattcctcttgggaatttttcctccagagaccaaacactacttgggagcttgtttactgggctttaaaagcttgtgacccccagtcactctttcttgaccccaaggctttgcatttctgtggcttccccactggacagaagtggaactgtcatgctgcctgttctggggtctcccagaggtttccccatgtcctctccttgcttctactgccccacagaattggggatctgtgaccacatatggtatagaattaatgcttgagaatggtttagttcagtgatgtcaaataagattcacttttatgccacctccatcagttgaaggcccccctggcccctaaattggaaaagattctgagacagaatccccgtgggtacagcgcagggacagtaaaggcacgtgtgctgtgatttgctatccactgtgtggatgcatccaggaatatcagaaccctggaagattatttaaggggaagttaggacagcttttttgccaatccaagggtgttcttgaggaagtctgtcttcctgtatggccttcagtttctttcctgtgtaaccatggggccaacacataattcccacagctctattggcccttgtctgccaggattctctagggtctgattcgaggtggatcctggccctttgaggtggcagaatctgatcatggtgctgtttccttagatttaggccttgatacccttggcgagagcatcctgggctgagtgaccacctgaggtttttctggtgattttgtgacccatgtaaaactttgagctttgggattattctctcaaggaaatagtgacatttggtgaagagcctgtttggtgtggctatgtgaggcttagccaagaaaatgcaccatttttattaggaggttaggccatccgttgccacaaagtgtcagatgctaggcctagagcctggagaaaacttattttaaaattgatggggtgctggaggggttggggggtggtggctgtagctcatgaatcaggtgctaaacctagaaacaaaaggcctcatgtggcagactgtttctgagcacagatgaatggatgagcaactggcgcaactttgcccagttggtccagcttcccacttggccacctaggcttgctgtgaagacctcgtctggcagaaatgagagtgtttttgccccatcttgatcttaactgtaatttaagactaaaatcttagattctaaaacatcaaaggcaagatggctcccagctctgtgagctcagcttctcacctcttagttgaacaagtgcagtgtgggtcaatacatgattgctgctcttgctgccaggaactgtcccagcatagaaaggaatgggacacaatccctgccgtcaagattctaagggaggaagcaggcaggtcgactggtgcctcatctctgcagggctccagccaaggtttgtgaaggattttgcaggcatatggagtggggactgattgatcccgagaggggactggggaaagctctgaagaggggatgacatttggtttgaactccaaaaaatggttgctttacctgtttcctgaagtttttgaggtggcttataagaacatataccataaaaaggaccaatataaatttaaaatcagaaaaagagaaaatgggctgggcatggtggctcatgcctgtaatcccagcactttgggaggccaaggtgggtggatcgtgaggtcaggagatcgagaccatcctgcctggccaacatggtgaaaccccggctctactaaaaatacaaaaaattagctgggtgtggtggcacatgcctgtagtcccacctacttgggaggctgaggcaggagaatcgcttgaaacctgggaggcggaggttgcagtgagctgagatcgcaccactgcactccagcctgggcgacagagtgagactcctcctcaaaaataaataaataaagagaaaatggaacttagaaaattaagaggaagagtgaaaaggtagatatttagtcaggcacagtggctcatgcctgtaatcccaacactttgggaggccaagacaggaaaatctcttgagaccaggagcttgagacttgcctggcaacatctcaggtgagaccttatctctacaaaaaatttaaaaattagctgagctgtgtggctcgtgactgtgatcccagctactcaggaggccgagaccacagcccaggaggatcgcttgggcccagcagtttgaggctgcagtgagctggcaccactgcaattcagcctgggctacagagcaagacccagtttaaaaaaaaaaaaaaagatattcaaaccatgggtcccaacgtagttattatatttgaccatttgcaaaagctgaaagcaaaacatgttacacattttcagagaggaaaatacacagtagttcctgagtgtaagttgtttttcttgacctcattcttaaattgcttcatgagggtgggagggaagtggtagttaataagtgaacctgtaaaccagcgtttctcaaaatgtagtccagggaattgcatcaaaattgcagttacctacagtgcttgttaaaatgcagattcctgggcccctgccccaggcttatcaaatcaatctggtgagtaggactcaagaacctgtaaattcacatacttctgcagatgattcttcttgcactgcacagcatgaaagcctctgcaatagacagaaagctaccagcattgcgaaagcaacttgagtgcttggcctttgaaggttgagtgggactttaatgagggagagagtaaggcatgagaaatggcagttccactgaggtcagtcagtggttcattgctgacgaagtcacttttaagtcatgttttagaagaactaccaagtgtggcaggtcaggcatgtggcaggactgtttctgagcacagatgaatggatgagcacctggccccactgtgcccagttggtctagcttcccacttggccacctacggtctgctgtgtggaccttgtctggcagtctcctttaatttattttttattatttttttctttttgagatggagtcttgctttgttgcccaggctagagtgcagtggcatgatctcggctcactgcagcctccacttcccaggttccagcgattctcctgcctcagcctcccaggtagctgggatcacaggcaagtgccaccacgcccagctaatttttgtatttttaatagagacatggttttaccatgttggccaggctggtctcgaactcctgacctcaggtgatccacccatctcagcctcccaaaatgctggaattacaggtgtgagccaccgcacctggcctattttttttcagcaaattctttgtttttctctctgttcccaaatgcagggtactgagaccacagatgtattctgtttcctgttgaaaaaatgtttctcacttagctgggtgtggtagcatgcactgcagtcccacgggaggctgaggcgagaggattgcttgagcccaggagttcgataatcatgccattgcactctggtctgggtaacagagcgagaaactgtctcttaaaaaaaagaaaaagaaaaagaggtcctagggaaagaaacaaatagtggcttggatggtgagttggtggaaagaacagtgggtgttgggggtgttgaacttgtgtttgtgtgtggtgtacccaagacatatcatgtcagcattaagaatagactattcctgttttctggtcactgagttgtatgttttgacatccttattttggaagatacttccttactaggaatgggatagggagggggtcacctttcccatctgtgggtcatattttaaaatatttattgttcaagtttaaagatataaccaaaggtataaagaaaaataccacaaacatctgatttaagaaacaaaccagccgagcgcggtggctcgtgcctgtaatcccagcactgtgggaggccgaggcaggcagatcatgaggtcaagagatcgagaccatcctggccaacatggtgaaaccccgtctctactgaaaatacaaaaattaactggtcatggtggtgtgtgcctgtagtcccagctactcgggaggctgtggcaggagaatcgcttgaacccaggaggcggaggttgtagtgagccaagattgtgccactgcattctagcctggcgacagagtgagactccgtctcaaaaagaaaaaaaaaagaaagaaatcatttcctacaccttcgaagccttcatgagttagattttgaaacagtgcaaaatgcttcacgtgagaatcgagagtcccttctggtggctctccatcccctgctcttctgtcaggttttcttgtaggtttatggaaacctttgttacttgtgcaggtggcagagaagcagagaggatagctgcgcgccacccacacagctaggatttattggcgtactcccacgtgcatggcagccaagtggacacaactctgtgatgaatcctcccaagagaactgaggggccctgatggaggagctgcttctttgcaaagctttccttgactctcttcctgtcccctagttgattccccttctgtgctagttttagcttattgtttgttacctgtcacacttagcagtactgttggctttgctggtctccttgactactgggggtaaagaccttttgttgttgttgttgagacagagtcttgctctgtcgcccaggctggagtgcaatggcgtgatttcggctcactgcaaccttcacctcccaggttcaagagattctcctgcctcagcctcctaagtagctgggattacagctacaccacacccggttaatttttgtatttttaatagagatggggtttagtagagatggggtttcaccatgttggccaggctggtctcaagcccctgacctcaaggtgacctgcctgtctcagcctcccaaagtgctgggattacagacatgagccaccatgcccagcctcaaagacctcttctttacttgctcaccctgccgcccactcccctaccaacccctgcatgccctataccacctggcacatgatacatactaactgggtacatgtttgaatatgaatggatgtggtgctgtgaatgcttaggggaagtgggtgaaatgcttaagaaccaaccttgagtggtctgggaaggcttcctgggagggtggtgtttgagctaaggccaggcagctgttagatttgttagactgaagcccttgcagacttagagagcttgtgctcttcccagaatgacgggtgagccacgtacagtaaatggtgcttctcatttctagcccaaggggcctcaaggggcaccgtgatttcacgagaatgctgcaagcaaatcttttctcaagctggggaatttggtggtaatgcctggctcagcttgcggtgcgcacctggcctttggaagattggtacagagagaagcggcccatccacatgagcctgtggaacagcactggtgggggagctgatttgtgaagaggggctgtgcagtgtactgtcaggtctgagacccaggaagaaattccagtatcccagctctcagaatcacagagttctaggcactgcctagttccacgtgttcccaaatgtttcctgaatacttggatttcctgtccagagaattttcaaaacaaacttagaggcctgacccatggctgccaaggaaggattttttttttaaattaaattttaaaaatcagtccagcatgaaaatctatgatgatttcataagagaaaggacattttaatattcaaagagtaagaagcacttaatcttggaagaaagggcattcctatactttgattacctttagtttaattaaaaaacacctacatggtctttacttctgtgatttcattcctgggctagtgaaacattgtcacaataaagcatcaggccaacgcttctttcgacccactggccaatcagttgacaaacagtgactagatgtttcagcctattttgctgaggctaaaggattgaactagtgcttcagccagcatgaaaaccagtcaggagtccgtgctggtgttggcttagattagcagggcctttgatggaggggcatgtatgtgtttgggtttgctgtgccaggcaggggagcagtggaatttgtctgaattgagctcacacattgaagttattgagcgacttacatgcaaggccatgacctggactcccagccgagaggcccacgtggcggggcttgagctgggggagccgaggacagcttacatctgctcatctgcttacgtaaccctgcctcccagcttccagagccaagaaaacacacaagccagcccagcggggccgagagcctgtggtagcacacgccatgcgccgcacagcaagggcgccttggctcggcttgaggcctgtcatgaagccctcagccctctgcctcctcccagagcttctccccaccaccccaggcagtggctctgaaacctggtcgcaggtctgcatgattctgaacagaggtagtcgttgccttcctggagtctgagctctctggagtttctcactgggacagagccaggtgtgtagcagagcatggtccctgcagtatggcaggaggtgtgcagggcattcaggaggcctcctggctggcactcgacccaattagtcattcaacgccaggtctggggctgctgtctgttgtctcaaaggtgtgagctgcaagatccttagagttgtggagaaaaaattgccagattggcaagaagggcaggattgggggtcaaggtgtctcagtgtgttggaagcatgatgggggttgtgcaaggggcacagcgagttcagaagggagcaggagagtgagaagaggctgttcagtgataaagctctgcacagagccattggaggagcaagctccttgaccatccttaaaccagggtaattttcatttaggttctgccacacgctcagcagggaactcctggaaggcaggatttgtcttgtccatcctccctccctacctcaacccactcctccttgggctggcacacagtaggtacccagaaagtatcaattgaaacaaattgaaagtggtcttgatacatatcacagggcaagtttgcagttaacagacatttcagagtaaagactctctggcttggtgctcgatcggcttctgtgggttgtcagcatgctgtggacagccccggcatgggagcgagtgggcgtgtgtgtgtgtgtatgtgagggtgagagagcgttagtgtgtgtgttggggttggggagagaggagggggaatagaagatggaccacccgggtatcagcttctgccctggggagatggtggtgtcagttgctgagggaatcctgagaagcaggtctggctgtaggtggtgatggtggtggggttgcatgagaatccatttggggcaggttgaatttgaggtgcccatgacatatggctagccatgttctgttggctgtgaggtcaggagagagacatgagatggaaacagaggtttgggaactgtcatgtgcttaaaccaaagacctgggtatagggagagtgagaagagaagggggcaaagatggacatccaagaaagaagctgagaaagcctaggaatttgaggtaagaggagacgtaggtaaatgtgacgcttggtgatcaaggcttctttccacctctcctatgctggacactcacgtctcctgtctgcttggaaattcatgctgagggcagggaaggtgggagcaaggatttgtctaaagatcttgctttggatccctgcactcctcctggtttaccaagtgtcactggacacgtcagggcgttctgagaccttagagagcatccagtcctgtccctgcagtttacaaatgaggaaaccagtaccctgagagtggctgtactatccactctcaggataccaaagatcatctggaaagtcactggtggagctggaccggggcccaggcatctcttctcctgtccggggctcttgacttcaggaccacctttctgaaacccatgatggggcaacaccaggacactttccagcctgcaggtgtctgtcccgcggaagcgagccaggccacatgtgaattcctgttttctgggtgggtttcagaaggtacgagcaagtcggcagggtgacagcccaggtgcttcttgggttccccaaaacgcggttatgtttagcagcatcctcagaaccaaaggtggggtgggggctgcagatgttgtgggggccctctgaagtgaaaagagccctgtgacagatcttttcttcatgtttttcacaagttcactgtgcagcagggcccccccagtagcctttgcccagggttgggtgttgggcagcccaggcctggctgaccttgtggggaagggtgtgaatggtgggaatccccgagggccctctttgcccgaaagccctaagccttgacatcagatgcccatcagatggtccatcggagccctactacccagcttgcccagtgagaatcatctgggctccttgttaggtagccatttaggtccttcccaaaatccacagactctctaagggaagggcccgagatgctgtacttgtactaacttcctcaagcaattcttgtgataggtttgggaaaaacttgtccagggtgaccactgactgagtcctggtcttctctgaagagcacagtgcctgctcactttagggcaccctgggaggtgggagctggctcagcaggcagtcttataagggactgagcttcaaggcctctgtccctccaggagggaggtgcatgaccagagagggaggcctgaggatcttcttccctgccccagagggtctgctgcctgagctctgtgatagcgcagagagtaaaaggatcaagcttgattgaggcctatctctcaatgcgaaagtttgctagttaagaggagagtgggaagggcatttctggcaaagagaaaagtgtggacaggcatggcttaagggatggggagggagacagacagagctgagggtgaagggccttttgctcagctgtgggccttggccttcccttgtgcagggacacacagccttagagccactggaggttttagtgggaaagtaatatggtcggggctgtatctcagaagaaaacaaactaatgggaacaggtcctgtgatggtggacctgggtcagctacggagggagggaagatgtgagatgtgtactggggaagggggtggaagtggcagctatctggtgagaggaagcaggcccacagctttttttctcaagctgttgaattcagaagggcgagtgattccgggagtagggggtgcttggagagccacgcgttattgataaacagggcaggctgaagcctgctcactggccctgggcgggttctcaccagcatgtttcaggttttgatctgtgcttgtggttggtgttcctacctgttctctaggttccttcctttgttcttgtggctcatttgcttcacaggtgaagctggttacactagagtaacagttcccaaagtgtgttccctggaaaaatggttctgtagccaaataagcttgggaaatggtgggttaaatataacgaagggggtttttcgactgcacaacttctcagagcctttggtgtgtgtcgtgactttgcagaagcaggatttaatacgcagcattcccgttcttatttgaccacgagacatgtttttccattaagcatcttgctgggtctgatgttttctggaacccattttgaggcggtctggtctgcagagagtatggggagcctgggttcaagccttggctcttgactctcagcagagccttgattccctgtgttgcctggactgcaccacgtgtaccacatacccggtatgtgacgttttcctcatccctcttcccacctgccgttacctcacaatccacaatctgcacctcatccatttttcttctgaggcaagcactctcttactaacttacttatctcatctgcatccatgttcttctaggccagaaacttgggagtcatccctccctctttgttacttcttcttcctctttgttactttatcccctctgttactaaacattcttctgtgtttccagctatttcttttattttccctcggtctcctttggggtttctttgcctccatctctcccagaccttggttcaccttccatcgagtcccttcctgggacatgggcactcatgccactcctgctaccttccacttcgaagctaactccctccacactgacgtccccaacatgcatgcatacacacacacacacacacacacacatacacacacacacacacacacttccccagttaggctagaatcagagagatgatgtcagccatttgtccaaggccacgcagctgggaggtcacagagctaagtctcaacctcaggggttttgagaaattgccttctcatccgtgatcactgatttctacaacagcctgtcaggaagtctgggtagaaattacttccattttacagtggagtcagagcggggagggtcctgggcaggcgagtgcttcacagagtgaccaaccatctaggtttgccccacactgaagggggtttctggggatggttggtcaccctaatgctggatgtggtgcctgatgctgggcaggagggccctctccgtggccacgttgcctcccaggaggagacatttcctctgcagctgcagctgcagcctggccatctgatgcagcctgtggagcggtggcgagtcctgtggcctgctaacttctccctccctccacctctctagtgggccccatgctgattgagtttaacatgcctgtggacctggagctcgtggcaaagcagaacccaaatgtgaagatgggcggccgctatgcccccagggactgcgtctctcctcacaaggtggccatcatcattccattccgcaaccggcaggagcacctcaagtactggctatattatttgcacccagtcctgcagcgccagcagctggactatggcatctatgttatcaaccaggtgaggcctgggaaggtggaatgagagagggtgtgtgtgcatgcagatgtgtatcagatgtgtgtgtaatgagggcaggggaaggggagtgatttcacagacacctggcacttacagcgaggaaccagccccccagccaccaccagtgcagatgaggtaaacgccaaacagtgtgcttgcctattgctgtcaactctatagccaagggaaatgctggagtgttttcgttgttctgtttttgttttctggaagtagccttccagcaagattgggaaaaaagacaaccctaattattccaaagtacacactgattattccctggctttgtgtagctgtgtattttccttttaaaaataaaaccaccatttagatgtcagacttttaggtaacttcaaagtttatccagtcagtcagagcgtgtctcctggggcacctggagacagtgcccttagttcaggtcacatgcctacatgccagcccctggtgaaatatctggagaagtctgattcgtgggccatctgagagttatgtggactgggccgagtctgagaaaaagtttctcactgctcgtctgatccatatgtgttgggctttagccctgcttaggaaagtaatgctaaggataggtcaactttcatcaccatggcatggagaatcagattgatctaagaggcatctttattgaaataaatttttcagtttatttgaggagcattattttcccaagagtataactttgatatttcaagattacccctaacacttaaattcatgtttttagactataacctcctaggtgcaatgacacatctaacttatctaagcacccagtttcattgaaattcatttgaagagtctgagtacgcccatttctacaaggcccaatgtccatttcatttcgagataaactctgctttaggtaggaggattgttggcagtttacggcttccatcaaggtcaaggaactctgtgcaccttccctatgaccccaggggaagcactcgaggactgctgtggcattgtgctgcatcacttgctgcagggagattctgaagaagtgtaaggtctcagtcctgccctgtcccgaagcctccaacccacttctggcaagtgggaccttcccagggaacaatttgttaacagacccaaatatcctgtgattggatggtggctgccaaatgctttggaagctcagaggaaggagagagagcaatggcttggaagaaccaggatataaactaggttctaaagtctgcagggagatgggcttctcagctggggccagtgagcagggaccttaaggcagaaaggagccttgcatgttcctggaaattgagatgcccactggggtaggaaagcaccagaagctctgggaccaggtgtcagagttaagcctgtgaggcaggagagagcagaacaagccctgttacaaggaaactgaagcaggagagcaggtggtgggcaaaccccttgaggctgtttgaattcttcggccaagtgaggtacagaccagggccctatgaacacctgcaagcaagacagccacgcagttgtgggtcaccttggaagaatattggagaatgcaagagagaacaggtaaatgtcctgcaaaatgcgggtcactttaacccaacacatattcatttaagaaaagctctgtgattgagaaacatttgtctgatgccagttagcacataccaatgacggcaagattcaggagcctgttattaaagcagtggcagcgagcacctggaagaggcggccaccatcaccaggagccagcagggatgactaataagccgtgccagctgcatctcgtttctctcttgacagttgctatgccagtagatgagggatgtactgtggatacaatgctgtcatatcttattcagcagggcatctgatagcatcccacaaatctgcctgagtagaagacagacagctgtggtctgggtgccatataggtaggttaaaatatatatttgggcctaggcgcagtggctcatgcctgtaatcccagcactttgggaggccaaggcaggcggatcacttgaagtcaggagttcaagaccagcctggccaacatggcgaaaccccgtctctactaaaaatacaaaaattagctggacatagtggtgggcggctgtaatcccagctactcgggaggctgaggcaggagaatctcttgaacccaggaggcagaggttgcagtgagccgagatcatgccactgcactccagcctgggcaacagagtgagactctgtctcaaaaaaataaaataaataaataaataaataaaatatatacttgggtaaagaggataaaagagttagcgatgatgctgaatttttgaactgaggtggctgttttcaaggaagactggagggtgggatgctacgtctagatatgttgcagtttaggtgaatgtgagacttccctgttttgaagtcaaatattggaccagtaaaatctagccatcagcttaaattcctatgatacaatttacatactccccaggctcaacacagtagatttctgaatgtcctctgccagctacatgctcctgcccacctcaatccgagtagatggaacaactaaccaagccagctcagaccggtggcacagctgtgctggctaacactgggcaccacctaagagagtgcttctccaaaagtgtgcttccccaaatggagcgaaatacgcttgaggaatgttgggttgaaccatgtaaagcaggtctcattcccgcagagcctttggtaccccggtgtacactgtaaccccagaagtgtttcctgagcttgcctgacgagacaacttttccaagaaccgtctcaagtgatgagtgttttgtgagtcacactttggggaaagcgggcctaagttagcatctcctcccagctgcctccctgctttccctggaacactaggaactgcccgtcctccctccctccctcctcttcccacttcacaacttagcatcaggaatattttagttttggtttttcaaacatatatacctccttttttcttatcttgtcaatatcatcttttttttttctttgcttttcctcatacttttttttctcttcatcctttccttctccaagggttaactttccaccttaggagaatcttttctgctttttctcccacttccccagctactctcttatcatctgctccaatctcaccctaattgatcattttgggaaaatatggtcagagtccagataactaagttgagaaatgcttaaactctgccatacctttccagtaaagaatattacctaataaataataaaatggtaatgggaaacctgaaccctgaaaaaaaagaggtggaaggagaaacatttggagcacatcctgtctacaaattaggaactgcctgtgttatctgttttatggttatattctagaagaagaaagggattttgtagcacctggttttgacctttctgcactgtttgttgagcaaataaaccttatgggctgttagccctctttatagcctctcagcttatccctggcccagacaccctgctgtcattttgacttttcattcccacacacacatacacatgcacacacatgtacacacacacacataccatttaagattagacagaagtaatgctcaaaatggagtggcttctgagacatttagtccaagggttcccaaacaggcttttcagtatcagatttctttctgccccattgaaatgctacacaaccttccgcttacagcaggtcacaagggtttcattctacttgaagtaggggccatgtcccatttccacttccttggcttcccattcagtcactgctaggatttgcctagacccctgaggccagacaatgtagaaacttctgctccatgtcacaggtgaggaaacaggctcagagagggacaggctccgaaagtcacatagacaacagtagggctgcggctcaaaccccagcgtctgactccaggtttagtgccttctcagggcatcagtgacactcctcatggccagggtgcccccagtgttgctcacagtctggtatccagggctgagagtgtgctgtgtgctcagactgcctgggttcagtcctggcactgccactttacagtcagtgacctcaggcaggttacttaagctctgcaggcctcagtttcctccttggtggggagggttatgaggcatccttctcatggtaaaccttcagtaaataccagccgttactaggagggtccactcctgcctctccactctccattcatcctgcctgtttcctctgcctgcttcctctgcctgcttctgtggtggtgaattcttcatggctcccaccgcctcctgctgcacccccactcagggcccgcatcaggacccttcctcctattggtttgaactccttggagtcagagggtaatggatagtggagtgagccaggtggcagaatctcagaggccatcccgggcctataagcctcttcaaaatagggccacgtatcaagctttacacacaggagtgaactttcacaagttgttatgactcatactctgtctatagtaagctgttaaccactcccatttggcttatgcctctgtaattattgtactaacttatatcttaaaataaggatattgaaggaatgagccgggagaggctttcctggttgagatatagaagaacaagagttgctctttttccttaaggtctctcctcccacccctgaccttagctcaccagcatgggagaatactatttgactccttgtactctgagacgtggatttcaagatatagcattccaacttcaacggcagcaagaaaagaagcaacagaaggagaagacatcatagcaaacagggatgcatgctgcatttcctaatactcaaacccggaaacgagacttcactcaaggtgaagggagggcaggtcaccacctggtagcactagccctaaattaaggaatgcagaatgtttgtgggattgcccatcataaaaattacaaaatgagtaaggaatgcaggcacagctggccaggtgggtttgtcacaaccatggcagccctttgccccacagccagtacacagaactggtctctccaattccgattgcatatcttctggcacctctgttcctctccctcagctgcccaggatttttctggttctgaccatgttacttcctcttttaaacctgttagcatttcacgactgcctacaggcaacggtctaaatggtcggaaggcccaagcttagcatccgagaccctgacctacctccagccacttcctcctcctctccacttcactggactccccatctccacccagacacctctgttctcccctctgtgtgcctttgcttatgctgtcccctgtgttcctagtgtgtctctggctatcttttaagcttccctccccaacctcattagttctgtggagcccctggaatagagctgacttctccttccctgctgctcccaggctgctcagaactttctggaaagggatgattatctgagttccagcctcaccccagcccccggactctgagtccctcatgtctgcctcccttctttctctctgaccacacagctggtacatagtcagtacagacgcagtcagtgagtggagcacggggcttctctccaggattcctgcccctttgtttatccctagtctcaggactccctactcctggtcttctgcctaaatctgtgcctcttggaagtgaagcctccgttcccagtggggccaggtcctgacccttgggaacttgcaggatccctcccttgggcctctccccgaagcttccagctcaatgctgaccagagcacaggctgcctgtgacagtccttggggtgacctcccttatcaggaaaaatgcagaaaacctattaataccttagccttgtgattgttaatggtcacaaaactcctttagggtcctttggactcagcacctttatggtctcactttgaattttgaacctcccacctccccccatcccccagagtaaggcaaatggtcttctgattgttcctgcagagggaaggctccacaggtaagcacacgatggccaggaagcagagctggagcctgcctgaaaggctgtggagaaatggagggagggctgccctgaggactctgtctggctttgaagttttctactgtttccttttcttctgtgcactgttttaggatgatggggtgatagttccaggctggttgaggatggatttggagacagtcctttgtaccctcagtgagcaagagtatctgtcaccctacctcagcagttgtctctgtcactggtccaagcagctggttcctacacaaggtcaagatcaactggggagaagcagactcctgggtctatcccattagtgaggacagctgcctgggcttatggcctcattggtttggtttctatcttgatcatctctaccatccccccatcccggccttccattttctacctcagctgtcagtgcacagattgatgtgtgtgggaacggagcttgggaggagtggggtagggctggtcctgtcctgtagcctccccttccttcgggcacttggaccctttggagcttgccggggtggggaatgggagtgggaaggccagggagtgtctctgcaccatcactgtttgagtgttgcccctttgctgtgtgccccacctagtctatgtgtgtctctgttctctggggactcaatttgctggtgaattgcttccatggacattgttctgggaaatgccattttttctgctcacccatgactctgtgacaaggaatgacagcttattaggaatttgtttttgcattggaacagtggtcatcagaatgggccccttttcccttgcagctttgacatttgcctctcttttcctcacctctctcccttgcatccacccttttctctttttcttcttttttgttttccttctagcaggggccttttacctttacttgttaatcctgtttgtagcaaagcaagtggaaggaggagttcctctctgatctgcttcttattctccacctaccttctcttctgtactttccgcctcctagagagagagagagagagaggaatgccgacctaactaccgctgccactgctgctgccaccaccgctgccaccaccaccctggtaatgttcacatgtcctcaaatcaacccagagccagggccctgctggtcagggggaggctatgtaaataatcccatgagtgtgccatcctcaggccctggggtctcctaggcaagaccagggcctctgtgggctctctcggaaatgctgaggttgctggaagccagcccgtcatacagggtctgagagtttaacttcttttaaattaaaccacagttgagctcatgctgtgtgtgtataaacttttgtatcctgctttttccttaaattctttatcatcagcatcttcccatgttatttcatagtcttcatcatcatcactttccataccttcatagtagttgatcgtagaattccatcataattaacttgtcttttctctcttagaagtcccttaggtaatgtccaattttccgtgagtgtaagtaataccataatgaacatcttggagtctgaagtttattctgtgttggtttgttccacatttaggatcattttcccaggctagattttcagatgtgggattatgggttcagatatggtttacacatttttatagttcttaatacagatggccaaattgctttctgaaagagaagcttttcttaagtatttttctccaacttgtatcttaaacatcctgaacatgcttagcaccactgtcttgatatatctgcggaaagccacgtctccacttttcagtgtgtcgggccctgggagaggcaggcatcctgcgctggctccttggagctgggtttaaaattgtctcctctggctgggcgtggtggctcacacctgtaatcccagtactttgggaggccgaggtgggcggatcactaggtcaggagatcgagaccatcctggctaacatggtgaaaccccgtctctactaaaaatacaaaaaattagccgggcgtggtggcgggcacttgaaaagtcccagctactcgggaggctgaggcaggagaatgatatgaacccgggaggcggagcttgcagtgagccgagatcgcgccactgcactccagcctgggcgacagagtgagactccattttaaaaaaacaaacaaacaaaacaaaaaaacaaacaaacaaaaactgtctcttctgtgctcacttcacccagaatccctgttgggctcttcaaggagctcagttctctctgaaagcaactttatagcctcagtccagtctgtgttcctgtgtggcaggggtcaagggtatgctcactcttgagagtggtgtctttggttgaccaagaaccactcccatagcctggtccctaacccttgaaggcccatctctctcactcactggggtgaagagtttaaatctcagatccaagttttgttgagagctctgagctaccatattgctatggttaacaatagttaacaatgttaacaatggttaactatggttaacaatagttaacaatgtttaacaactagagcccagctgggtgtggtggcatgtgctaacagtcccagcttctcaagaggctgaggtgagaagattgctggagtccaggagctcaaggccagcctgggcaacatggcgagaccctgtctcccctgcaaaaaaacaacaacaacaaaagcaaaactagagcccaactgctgtgaactcatggctgagtagatattattagccctccacaaactcagcatttgtataatcccaggctgtttccagtaattctctggggatcatctcccagcctgtccactgttccaggatccacacttaggcctataggaatgccccgtcagagcttctgctgccgctgatctgttactgtttcatgcaacccactcggcctagttccttcctcttactgtctcagtgggcacagaaaagcatacagagggtgtttcagcaaacattgccactggctgcagacctgcccccggatctgtcctgttgagagcttagtgctgcgttcttgcatggtggggaggggtgtggctctgtgatgagccagggcatgtgtataggagcaacagtgtctctcttatcacgtagaagttctgactcattgcgagtcttggctttgggttaatggttccagccatgttgctgctgtgtcttttggtgcaggagaggctgggcacagttggtccctaagccattatggataagggatgtgtctgctgatatacacacatggacctgacatccagggaaggcagggtgattggacagaacagttcttccagaagctgttggaacttggacaagagtggcccttggctttctgtagttggtcatctgtcccctgttgcaatcaggggaaggccacacttgccttccttaaccacagttaggattttcttggggattagaccagattctagcacctgtcctgaacctctcgccccgcccctacaaaggctgcttgcaagtgtagtgcacatacacagggagcaggtggggcatggaagtggaagtggagcccctgcctttggcccttgggggaggcactgtctgcttacccacggttgttgcctcataggaatcatacaacagcttcctaactggtctccttgccttcagttggattggggcacaaatccctccttgacatataaaccatggtttaaggctccctgtggcctaaataaagataaagcttaagtatcttaacaagcacctaacccttctccccagcctcggtgatttggctcatcgctgccttcatgtttcattctggcttcactcattcggaatttcttgtagttccttggctgttctcttttccttaccgcctttacaaatgctctcaccatgcatgcttttctctgctcctacagatgccttctctcccagcaccgcctccagagtctatgtctggtcgattctgtctgctgtctccagtccccatcttgtggcagtctctgctcaatcatttggggattttatatgttttctggcctttcttttgggggcctgtcttctccttctaaaagcagccagttgacctagaaggaagggataactgtaactcttgtctaccaacataagattaggcccaccctttaaaagctgcgtctttgaaagggacacctgcacccagcatgctggcttctcttcaccaagcgtgacttcctacgcatttcacaggcctccagaggtccccctgactctcttctgctgtgagaaactctaatcatgtaagccacaggctaattcccttgagccttaaatgtttttagtaatttcccattcatcagagaagcaggatttgggaggaattttgaagcaaacactacagaaggcagagtctccaggtaggatatctaagagacatttggaatggtctgactgttcaagatggatgggaaagcctcttcctgtaatgatagtagccaacatttgttgtcaggcagtggggccccatttttgagatggggtctctgtcacccaggttggagtgcggtggtgctgtcatggctcactgcaacctcagcctccccgggctgggtcttcttaattctgaaaaacccagcttttaaagggtggacctaatcttatgttggtagacaatgttgtctcatttaatacaatgcacatgctctccccataacacaaaagagggaactgaggcctggaggtgtgatgtaccccaagtcacatagctaataaataaagaagccagcattcctgggattaaaaatgcatgtgtctgtcactgtggtgtatttggtgcttgatcaatgtttacttgagcaaatggaggggcagaggtaccgatgagtgtgctcagtgaggagggcaggagtgaagctgggcgtcttcccgcctcttgtgagtggtggggcttggtgagcttgccagggcctgtctttcttatcaaagaaggtgtgtgccccagtgttacagcatttcacccaaagcagcctagaaaatgcttgacttttctgtcattccggggaggacactttcctcctccactgttctgctggcctggtgtacccacggcccctgatagatgatagcacctgctaaagtgcaccatgcccttccgtctcactgcatcccacagatgaggccaggctgggatgagggagaaagggagggatatatagttcaggttattttggaaaactgcctgaccaattttaagtctgggccggacactggggcatctcaccacgttgaaagggccgtggcaccccgggcggtgaaaggggctggaaccaggtctgcttcttgggcttctcctccagggtgccattgctcatgggccttggctgcagaggtgctcattcgtggttccaaaattccaattcctgggagaggaaaaatgcttagttcagtctcagttaggcctctgcttagatcaaacagccaaggccagtaggcccagtcctatggtagagacatggcctcaaagagccctctgctgcagttgttggggagtgtaccaagagaagggagcattgtcctgggctgggcagccctgggggtctagtgcatagatgtagaaaggctctgttggtatacctccctttgcttgttggaaagtgctcaacggggctgaattgtgtttgacagtgtaagtctgggctggggtgagggttgttacaagattgtcaagatgattaaatgaaatgccatttgaaacacttatccatgccttgtgtatggtatccccaccagtgaatattcacagtatattataataattccaacaacttcataattttcatatgcaatttctaaactttgaacttttttttttttttttttttttttgagacagtgtctcgctctgttgcccaggctggagtgcagtggcgcaatcttggctcactgcaacctccacctcccggcttcaagtgattctcctgcctcagcctcctgagtagctaggaatccaggcgcccgccaccacacccagctaatttttgtatttttagtagagacgggctttcgccatgttggccaggctggtctcaaactcctgacctgaggtgatccaccgccttggccttccaaagtgctaggattacatacgtgagccactgtgcccggcaattttttgtgtttttagtagagatggggtttcaccatgttggccaggctggtctcgaactcctgacctcaagtgatctgcccgcctcagcctccctaatgctgggattacaggtgtgagccaccacgcccagcctaaactttgaatttctttgaacccatgacttacacagaattagctgaacgcagaattccaaatcaactcagcctgtgggacagccaaaaaacacagtgtgcctttgggctccttcactcaccacgcggggttagaaaactttgtcagaggctttaaaaaaggagctcttgtgtgtaaaatgtttccttgattctctttctggtgcctctctttctctaagtggtttgcttccccaagttccccacctgagtctgggtggctgtggcacatctgtgcattctgtacgcacacaggcagccttttggagtgccagtttccaggtcttggttttatttatttatttatttatttttttgagatgggggtctcactctgccgcccaggctggagtgcagtggtgccgtcatggctcactgcaacctcaacctccctgggatcagttgagcctcctacctcagcctccagagtactagggaccaccatgcctggcaaatttttgtaattttttgtagaggcagagtctcaccatgttgctcaggctggtctcgagctcctagactcaagtgatctgcccaccttggcctcccaagtgttaggattacaagtgtgagccaccatgcccagcccaggtcatcttttgagggcatggagagaagactttgagcatcccacttttgagattgtgtaccagtcgcaagcccctatgacacactttttccccaaagtagagggctctgactatgttgatcccaagagagatgggaaagagcattgaatgaggattccaaagtattgggccttagttcgtttcctcatgttggtgttgtgaagattctggttaggataacagcatgtgtgcaggaggctttgtgaactgctgagagtgaggcgtggcaatgtcagtgctaggtttgtccttactaacctggggccatgggaattgataagaccagattcccaactctaccccacaatgtgatccctgtggtgacccctcacagggctctttggtcgagcttcccagaagggatcaccatctgccattgtatgttgaaccccattcattcattcattcattcagccaaccagcaactatttgttgagctcttattgtgtgagaagcagtcttcaaggaactgggtgaataaaaaaaacaaaacatcctaaccttcattgagcttacattcttactgaaagaaaacaaataaaacatacatgtaatcctagcactttgggaggccaaggcaggcggatcacttgaggtcaggaatttgaaaccagcctggccaacgtgaaacccatctctactgaaaattaaaaaaaaaaaaaaaaaaaagccgggcatggtggcacatgcctgtaatcccagctactcgcgaggctaaggcaggagaatcgcttgaatcctggaggcagaggttgcagtgagccaagatcataccattatactccagcctcagtgatgaagcaagactccatctcaaaaataaaaaataaaaataaaaatatgcattccctttgcaccagcacacttggtgcctggggacctcgtggttggcaccctgaagcaggtgtccctcttctgtcttgcacaccttgcttctgtcctggtgtgtatggcatggccttctgccctccatggtgagcactgtgagggcagaggttgagttgggtttgctgtatttctcaggtgcctaggtttgtgcttgacaggtagatggaaggcacacaatgtggtcatcaaacctcagtcaaccatataaggaaggtagaagtgaaaagtcccataggtacccaactaatgtcaccagtttcctggatacctttcctggagtttatttatagtgtgtataaataaatgatgtatgtgtttaaatgcctttttcacctttccttttagagctgcctctttttaacagttccattccattgtatggatgtactatgatttattgaaccagttccctactgattattctgttttttgcagtcttttgttatgatgaacattccacagtgacaatgttgttcatagtcattcacacacatgcaagtccttctgcaggatatatttctagaggggaattgctgactcagaggttttggtactctgtgttgattgtagagtgacggcagaaaagtgaggcccaagagtttcctagtgaccatgtgtagtggacaagtcaccagtccctgtgagtgtttggcccaaaggctttaaggcatttgatatcactgtttttgtttctgcaccaggcgggagacactatattcaatcgtgctaagctcctcaatgttggctttcaagaagccttgaaggactatgactacacctgctttgtgtttagtgacgtggacctcattccaatgaatgaccataatgcgtacaggtgtttttcacagccacggcacatttccgttgcaatggataagtttggattcaggtaagagatactcagtcagaatctgtggtaaacatgtctctctcatgtgttgactaggaaatgcagtcctggcagctcaagagtgcctctttaagctctggagcagaatgcctcctctgagaaatgggtgctttgtattagttgagatggaaagaagagaccagaaatgcctgtagtctctgcacatccagacaaaaacaaattttccccccttttttttttttgtttgttttttgagacagggtctggctctgtcacccaggctggagtgcagtgccgtgatcttggctcaccgcaacctctgcctcccgggttcatgccatcctgtcacctcagcctcctgagtagctgggactacaaacacttgccaccatgcgcagctaatttttgtatattttgtagagatggggttttgctgtattgcccagtctggtctcgaactcctgagctcaagcaatccatctgccttggcctctcgaagtgctggattataggcatgtggcaccatgcctggcctaagaacagtttttagcatttgggaggggctctcatctttaagctccaaatgatactgtattttcttgcttttttctttctcttgccccacaagttttggaaagtaaattggaatagttttcccccactgaattatttagcttgtatacctcagcagatgttccttggcctgttttgttttgtttttgagacagggtcttgctctgtcacccaggctggagtgcagtgacacaatcatggctcactgcagccttgactgcctgggctcaatccatcctgcagcctcagcctcctgagtagttgggactacaggcatgagccagcatgtccagctaattttttatttttagtggagatgaggtctggctatgttgcccaagctgggcttgaactcttgggctcaagtgatcctctcacctcagccttccaaagcattgggattacaggtgtgaaccactgctcccgcccttggccctataagaaggaatgtgattctgttttccagcagggcacaaacttctgcttaaatacaaagcccaaatttttccaccaaaatgcccctagtgaagtggccagcccagatgcccgactagcgtattatccaaagcatattgtcattggtggaaaatggccttatagtccattgttttgtcttaaaagtaaatatataaataaacttgtatattgtttcctaattccgtgtttatattaacataaaagtgttttaaattacctgtcagtggccaggtgcagtggctcgtgcctgtaatcgcagcactttgggaggccgaggcgggcagatcacctgaggtcaggagttcgagaccagcctgaccagcatggtgaaaccctgtctctactaaaaatacaaaaattagccaggtgtggtggcaggtgcctgtaatcccagctactcgggaagctgaggcaggagaattgcttgaacccgggaggcagaggttgcagtgagttgagatcgcgccattgaacttcaacttgggcaacagagcaagactctgtctcagagaaagaaaaaaaaaaacctatcagttgaataacaaaaccctttccttccttgctttaagtgaatctgaagatccaggagctgtgctgcaggtaccctctatgttgggtacccctggtttaggctgactagtacagtgtggttggctcatgtagacagcagaccctttattttagatacaactttttttctttttcttttattttttttgagacagagtcttgcttgtcacccagcctggagtgcagtggcgtgatcatggctcactatagccttaaactccctggctcaagtgatcctctcacctcggctttcctagtagctgggaccacaggtgtgggccagcacccctggctgatttaaaaaaaaaaaaatttttttttttagagatgtctcactatgttacccaggctggtcttgaactcctgggggctcaagcaatcctcctgctttgacctcccaaagtgctgggatgacaggcatgaactactgcacctgctgagatgcaacagctttctgtcagactcattttattctcatcatttcttcctgtcctcccttgctgggagcatgagagctgtgatgggaatataggaatgtatgaagtccttctcccagatcaaaaatcctaacttcttgtcttaaagggaggaaaatttgaatgtaaccttacttttagactcttcagaaatccttctatacccttccgtccccgctttcacccttcctccctctccgtgtgtgtatcttcttctcttgaaacacacaggtttataccctgacccctcttgattcatcccttgaagcacagtggtgaacaaggaaggggcccgtgatgccctaattctttgccacagcaccatgtttgtttcacaaggagcctggcaggtttgggcttggggcagataggggagagaaagcagcagagacagcaaaaccaaatcatgtcagcttggcatgtacttccctctgaaatagctaagaatccatttctgtaaaagcactgattatcagaaaaccttattggcctggccacctttggttcaaaccctcacattaataatgtggacagtagtatgaggtgtgccaaaggtggatgactcagcacctaagtgatgacacctaattacgaataggttcattaaagcagaccccctggggacctttgcttgaggatccttacagtcagaattcctgaatatatttgaaaataataattgcatctttattttcatatgttctgtatggtttggctgacttccccctcaaagtctgagttagagttttccttaatttatgtgatgggtttggtctttttggattccagaaagagctgggtgtggtttggagctgcactcagagtcacacaaaaccacagcctttagagaacccacaggaaggctttggggcacgtcctgattcttgacatttctcatcagtgctgactttgtatcccttaggagttcacaattcataaccactgaaatattaaaatacaaaaagttttggaaggatgagagcccagatgctctactacttgaaaatatgttaaaacataagttcatcattatacattttgctaaatcaggataaagtctgaagtttcaaagaagttttattttagcaaattttcagaaacactgcctcaactgttagggccagtgttctagtcagtatgcctttggaagcatgaaagctggattggtcgataggatgggtgtggaaggggggctgtgactgggtgggtacagagaggctctgaaacaatctcagattccaggagttcctggataaggacttcatgtgcgggaacagagcacaggagaagcagattcctgagccactcaggaagaactgggcctaggcctgctcttgtcactgactggctttctacataaccacagaaacagcactgtgttgtagaaagaggaagatcatactttttgatatctgtgtctaatttaaggtcatctgagccctgatagaaaagcaaaacagacaaaacccttgtaactgctccctcccaccccacccaccatcaaaaaagctttagagaggctggacatggtggctcttgcctgtgatcccagcactttgggaggctaaggtgggtggatcacctgaggtcaggagttcgagaccagcctgaccaatatggtgaaaccccatctgtactaaaaatacaaaaattagccaggtgtggtggcacacgcctgtagtcccagctacttgggaggctgagacaggagaattacttgaaaacctgggaggcggaggttgcagtgagccgagatcacgccattgtactccagcctgggctacagagcgagactccttcaaaaaaaaaaaaaaaaaaagatccggtttggtgtcttacaactgtaatcccagcactttgggaggccgaggccggtggatcacgaggttaagagatcaagaccatcctgaccaacatggtgaaaccctgtctctactaaaaattagctgggcgtggtggcaggcgcctgtagtcccagctcctcaggaggctgaggcagaagaatcgcttgaacccgggaggcggaagttgcagtgagcctagatcgcgcccctgcactccagcctggcaacagagcaagactacgtctcaaaaaaaaaataaataaaaactctagagaagcaaaaagaataactttaaaagtgtttatgttctcagcaagctttattttggggatgtcagaacttaactaaccactgctccttctgtgtgtatgtttttcctccagcctaccttatgttcagtattttggaggtgtctctgctctaagtaaacaacagtttctaaccatcaatggatttcctaataattattggggctggggaggagaagatgatgacatttttaacaggtaatggtcataacttagatatctttctcctctgtcaaccttcacttccagttttttaaccaatgcttggttgttccccaaggactgaccctcagatgggatgcacccctagtcagcccacattcttaggtgtggcttcctacaggtcctgcaggtgctaaaagggatctgtaggaaaatgagtttctgagatttttgtattggcctggaaaaatgtcaaatgggaaccaagtgacggggcaagtttactttgacttgctgcatgccgttttgtactcaaggagtaaaccaatgtcctttgtaaaaatccctcctttcattatggtcccctttcactgtgaaacaagtttccttgagcagaatcctaactgtcttcacagaagctttgtgttatatttttattttggagtattttcacatatacaaaagagatactgtagtataataaacctttgaggacctatccagccccagcaaccattatggcctggtcagttctgtcccatccacatcctggggctctttttaagctggtaaatcattatgatgtgggttgtcatttacagtggtaaaaaacatctatcagtagcatttgaaagaacattctgctcagtcctctggctgtagaggcttcaaccccaccagccaccgatgagcaccttctccctccaggagccagtctgagctcattactgagtttaatatcagaatacaccctggtgcagcctttctaaattgcagtaccagttaacagaaggtgtctgtcagagcaacacccaagtcattcaagttaccattgtgtgcaaacttaacagagacccacgtcttcaatataagccttgaaggaaactccagttttagtatgtagatggggtatcaagtgtgtgcacattgaacatctgctgcatacagagcactgtgccaggcaggcccaggacactgaaaacctggacatagggtccagacagaagcaagcctgcttccacagaggcactcctgggcagacactctggactgatatgacagtgtgcagggccgacaggataccacaggtctgaatggtcagaacagctggggagggagggagcatccgcaggcatctagtcccatgctaacgcagtggcactagaaggatgggtggtgtgtggagcaactttcttgaaagataaaggacctaacactttctatgcaccacttactgtgtgccaggcaaggccaggaatgtttaagtggtctgggatcagccagttctgcctcttaactaactttgctgtcctgctctccaggctttcattttggtcctcattccttttccttggaccaacacagaatcctccaccctgttctggctgcctctagtcttgttctcagccctccatttgtttttttctgccttttcccacatgttctgaagccctccattcgtatactactttccagagacttccccatggctaaaagcattttggaaatactgtatattaggcccctttcagatactggcaaccgtttgtgggatgctctgagaaggcctctgtgacttagcctggcccttttcagcccatcacctgccacgtcctaccccagacccttgtcaccagtccccaggagcttacgttgctccctgagggcactaggcttgctctcacttccatgcctttgcctgtgccatcctggctgcccaaaatgctatggcagatacctgttcatcctcaactgggctctgcctaggcttgctccagcagaggttacaaactctatgcttcttcctctgtgtctccaacctcatcttcctcttctcacctccatcctggccctaaaggccctatgtttgaagcattcacactgtatattctgtggggcacacggccccagtgtctggcacatggtagtcaacaccacaaaccgcagaaccagttgtaaaaggacatggagtcggaatgtgagttttaaccagggtcatgctgggctgggttctggcatgatgctgggttgtgggctgagtgagaacagcaagggtgatggtggatggagcaacagtcttgcagccggggctctcaggccaagtgtatggcagctctgtgataatgactttccctttactctttgcagattagtttttagaggcatgtctatatctcgcccaaatgctgtggtcgggaggtgtcgcatgatccgccactcaagagacaagaaaaatgaacccaatcctcagaggtgcattctttgtttattcatactccttccccctttaggatgaggtaggctgcaggtccgaggctctgggcctagagggaaattgaggtggtcaggttacagtggagagggaggaggaagtacgtgtgatgatttcttcttaagatttttgttttaagacaatctccttgtgctcttttccttgtaggtttgaccgaattgcacacacaaaggagacaatgctctctgatggtttgaactcactcacctaccaggtgctggatgtacagagatacccattgtatacccaaatcacagtggacatcgggacaccgagctagcgttttggtacacggataagagacctgaaattagccagggacctctgctgtgtgtctctgccaatctgctgggctggtccctctcatttttaccagtctgagtgacaggtccccttcgctcatcattcagatggctttccagatgaccaggacgagtgggatattttgcccccaacttggctcggcatgtgaattcttagctctgcaaggtgtttatgcctttgcgggtttcttgatgtgttcgcagtgtcaccccagagtcagaactgtacacatcccaaaatttggtggccgtggaacacattcccggtgatagaattgctaaattgtcgtgaaataggttagaatttttctttaaattatggttttcttattcgtgaaaattcggagagtgctgctaaaattggattggtgtgatctttttggtagttgtaatttaacagaaaaacacaaaatttcaaccattcttaatgttacgtcctccccccacccccttctttcagtggtatgcaaccactgcaatcactgtgcatatgtcttttcttagcaaaaggattttaaaacttgagccctggaccttttgtcctatgtgtgtggattccagggcaactctagcatcagagcaaaagccttgggtttctcgcattcagtggcctatctccagattgtctgatttctgaatgtaaagttgttgtgtttttttttaaatagtagtttgtagtattttaaagaaagaacagatcgagttctaattatgatctagcttgattttgtgttgatccaaatttgcatagctgtttaatgttaagtcatgacaatttatttttcttggcatgctatgtaaacttgaatttcctatgtatttttattgtggtgttttaaatatggggaggggtattgagcattttttagggagaaaaataaatatatgctgtagtggccacaaataggcctatgatttagctggcaggccaggttttctcaagagcaaaatcaccctctggccccttggcaggtaaggcctcccggtcagcattatcctgccagacctcggggaggatacctgggagacagaagcctctgcacctactgtgcagaactctccacttccccaaccctccccaggtgggcagggcggagggagcctcagcctccttagactgacccctcaggcccctaggctggggggttgtaaataacagcagtcaggttgtttaccagccctttgcacctccccaggcagagggagcctctgttctggtgggggccacctccctcagaggctctgctagccacactccgtggcccaccctttgttaccagttcttcctccttcctcttttcccctgcctttctcattccttccttcgtctccctttttgttcctttgcctcttgcctgtcccctaaaacttgactgtggcactcagggtcaaacagactatccattccccagcatgaatgtgccttttaattagtgatctagaaagaagttcagccgaacccacaccccaactccctcccaagaacttcggtgcctaaagcctcctgttccacctcaggttttcacaggtgctcccaccccagttgaggctcccacccacagggctgtctgtcacaaacccacctctgttgggagctattgagccacctgggatgagatgacacaaggcactcctaccactgagcgcctttgccaggtccagcctgggctcaggttccaagactcagctgcctaatcccagggttgagccttgtgctcgtggcggaccccaaaccactgccctcctgggtaccagccctcagtgtggaggctgagctggtgcctggccccagtcttatctgtgcctttactgctttgcgcatctcagatgctaacttggttctttttccagaagcctttgtattggttaaaaattattttccattgcagaagcagctggactatgcaaaaagtatttctctgtcagttccccactctataccaaggatattattaaaactagaaatgactgcattgagagggagttgtgggaaataagaagaatgaaagcctctctttctgtccgcagatcctgacttttccaaagtgccttaaaagaaatcagacaaatgccctgagtggtaacttctgtgttattttactcttaaaaccaaactctaccttttcttgttgttttttttttttttttttttttttttttggttaccttctcattcatgtcaagtatgtggttcattcttagaaccaagggaaatactgctccccccatttgctgacgtagtgctctcatgggctcacctgggcccaaggcacagccagggcacagttaggcctggatgtttgcctggtccgtgagatgccgcgggtcctgtttccttactggggatttcagggctgggggttcagggagcatttccttttcctgggagttatgaccgcgaagttgtcatgtgccgtgcccttttctgtttctgtgtatcctattgctggtgactctgtgtgaactggcctttgggaaagatcagagagggcagaggtggcacaggacagtaaaggagatgctgtgctggccttcagcctggacagggtctctgctgactgccaggggcgggggctctgcatagccaggatgacggctttcatgtcccagagacctgttgtgctgtgtattttgatttcctgtgtatgcaaatgtgtgtatttaccattgtgtagggggctgtgtctgatcttggtgttcaaaacagaactgtatttttgcctttaaaattaaataatataacgtgaataaatgaccctatctttgtaactgcaggtggtttctgtttgccaggtgtaagggttgtcatggctgtgggatggggtggggacagggtcattccctggtctgtgacccatacaaatacacatgcctccctggaatcagacatttccccatctgaacttcattctcttatctgtaaaatgggaataataacacatagggacttttttgaggcttaaaagtgacgatatatgtaaaacaatgactaatgcctcacaagtactcactacatagtagctagtgccatttcaaagtagaatttttttcccctagcagttcttgggccacattctgctattttcaacagataccaggatcattcagatgtagatctcagggccatttgcaccaggtgctcacagtgtaacttgaagggaattatccaaaatgaggtttcttgtcagtctcaggaaatgtaaccataagctctaaaaggtcttagtttttacccaggtgcctcctccttggtggccctgggtcaggctggttggattgaattggcactcctgaagaagggctgcaggaaaccagtgagcaggagagccacccttggcagggagctgcaggccctgcctgcatgtcactgctggagggatccctggtgacctcaggcctgtgcaaaggtggcctggggttcagatctggccttcaaacaggacaactctggtcctttggacaaaatgctgccttagagggtctgacaaaattaaaaacaaacaaaaaaaaacctgtttctttccttctcacacaccaccactcacaacacttcagttctgcccctagatatgtagggatttctccccaccaacaagcagttttctagtggacactagctgggtgtcctacagtttaactcaattctgacactgtctgcctggagatagcaacggatcccacaggttgagggctcagtctcacaagactgcctccactgcagatgccagtcacaagtagttggttgtgacctatgctttacaaaaatgttttttggatacagggccttgctgtgtcacccaggctggcctgaaactcctgggctcacacaatcctcccgccacaacttagaagtagctgagctgcaggtttataccactcacccagctatagttgtgacctatacttctgaccaaccagctataaattggggtttctatgagcctcttcttgggtttaatttgctaggtcagcttacagaactcagtgtaacacttaacatttactggtcttattataagtgatattagaaaggatactgatgaagaaccggatggagagatgcatagggcaaggcatgggggagggggagagaagcttccatgccctctccaggggctccaccctccagacacctccacgtgttcagctatctggaagctcatctgaccctgtccttctggtttttatggaagcttcatcacataggcctgatagactacatcatcggccattgccagtcagctcaaccttcagcccttttccccttcctgaaggatgggagtgggactgaaagtgccaaccttctcatcatggcttggtctttctggtgaccagtccccatccaggagttcactgagaatcatttcattaaaacaaaagacgttcctatcacccgggaaattccaagggattagaagctctgtcaggaaccagggtcaagcaccaaatattagaacaaaagattctcctagcataaatattagaacaaaagattctcctagcataaatattagaacaaaaaattctcctattgctcaggaaattataagagttttaggggctctgtaccaggaacccagcgcagaggccaaatatatatattttattatctcacagtgccacacaggactttgcaagctgtcaggtctgagtgagatggagcacaccagtgaaaggttaagttcaccctttcactgatgtgctccacttcactgagacacatatccacacagacacacagagacacacacatccacccagacgcacgca

SEQ ID NO: 486 - DNA, 21 bp, synthetic construct
  source 1..21: mol_type = other DNA
  modified_base 4: mod_base = OTHER; note = uracil
  modified_base 11: mod_base = OTHER; note = uracil
  modified_base 12: mod_base = OTHER; note = uracil
acgtgacacgttcggagaatt

SEQ ID NO: 487 - DNA, 21 bp, synthetic construct
  source 1..21: mol_type = other DNA
  modified_base 1: mod_base = OTHER; note = uracil
  modified_base 2: mod_base = OTHER; note = uracil
  modified_base 4: mod_base = OTHER; note = uracil
  modified_base 12: mod_base = OTHER; note = uracil
  modified_base 14: mod_base = OTHER; note = uracil
  modified_base 19: mod_base = OTHER; note = uracil
ttctccgaacgtgtcacgttt
